(19) United States
(12) Patent Application Publication
(10) Pub. No.: US 2011/0047644 A1
(43) Pub. Date: Feb. 24, 2011

(54) COMPOSITIONS AND METHODS FOR THE MODIFICATION OF GENE TRANSCRIPTION

(76) Inventors: Marion WOOD, Auckland (NZ); Michael A. SHENK, Amsterdam (NL); Annette MCGRATH, Victoria (AU); Matthew GLENN, Bethlehem (NZ); William H. ROTTMANN, Summerville, SC (US); Robert J. KODRZYCKI, Summerville, SC (US)

Correspondence Address: COOLEY LLP;ATTN: Patent Group, Suite 1100, 777 - 6th Street, NW, WASHINGTON, DC, 20001, US

(21) Appl. No.: 12/762,984

(22) Filed: Apr. 19, 2010

Related U.S. Application Data
(63) Continuation-in-part of application No. 10/856,499, filed on May 28, 2004, now abandoned.
Application No. 10/856,499 is a continuation-in-part of application No. 09/640,211, filed on Aug. 16, 2000, now Pat. No. 6,833,446.
Application No. 09/640,211 is a continuation-in-part of application No. 09/266,513, filed on Mar. 11, 1999, now abandoned.
(60) Provisional application No. 60/149,485, filed on Aug. 18, 1999.

(30) Foreign Application Priority Data
Mar. 9, 2000 (US) PCT/US00/06112

(51) Int. Cl. A01H 1/00; C07H 21/04; C07K 2/00; C12N 15/63; C12N 5/10; A01H 5/10; A01H 7/00; A01H 5/00; A01H 5/08

(52) U.S. Cl. 800/278; 536/23.1; 536/24.3; 536/24.33; 530/300; 435/320.1; 435/419; 800/298; 800/319

(57) ABSTRACT

Novel isolated polynucleotides that encode plant transcription factors are provided, together with genetic constructs comprising such polynucleotides. Methods for using such constructs in modulating the expression of endogenous and/or heterologous genes are also disclosed, together with transgenic plants comprising such constructs.

### CROSS-REFERENCE TO RELATED APPLICATIONS

[0001] This application is a continuation-in-part of U.S. patent application Ser. No. 10/856,499 filed May 24, 2004, which is a continuation-in-part of U.S. patent application Ser. No. 09/640,211 filed Aug. 16, 2000, now U.S. Pat. No. 6,833,446, which claims priority to International Patent Application No. PCT/US/00/06112, filed Mar. 9, 2000, and to U.S. Provisional Patent Application No. 60/149,485, filed Aug. 18, 1999, and is a continuation-in-part of U.S. patent application Ser. No. 09/266,513, filed Mar. 11, 1999, now abandoned, each of which is herein incorporated by reference in its entirety.

### DESCRIPTION OF THE TEXT FILE SUBMITTED ELECTRONICALLY

[0002] The contents of the text file submitted electronically herewith are incorporated herein by reference in their entirety: A computer readable format copy of the Sequence Listing (filename: ARBG_{—}003_{—}04US SeqList_ST25.txt, date recorded: Apr. 19, 2010, file size 2,329 kilobytes).

### TECHNICAL FIELD OF THE INVENTION

[0003] This invention relates to compositions isolated from plants and their use in the modification of gene transcription and/or expression. More specifically, this invention relates to plant polynucleotide sequences encoding transcription factors that are components of the cellular transcription apparatus and the use of such polynucleotide sequences in the modification of gene expression.

### BACKGROUND OF THE INVENTION

[0004] Eucaryotic gene expression is regulated, in part, by the cellular processes involved in transcription. During transcription, a single-stranded RNA complementary to the DNA sequence to be transcribed is formed by the action of RNA polymerases. Initiation of transcription in eucaryotic cells is regulated by complex interactions between cis-acting DNA motifs, located upstream of the gene to be transcribed, and trans-acting protein factors. Among the cis-acting regulatory regions are sequences of DNA, teinied promoters, which are located close to the transcription initiation site and to which RNA polymerase is first bound, either directly or indirectly. Promoters usually consist of proximal (e.g., TATA box) and more distant elements (e.g., CCAAT box). Enhancers are cis-acting DNA motifs which may be situated further up- and/or down-stream from the initiation site.

[0005] Both promoters and enhancers are generally composed of several discrete, often redundant, elements each of which may be recognized by one or more trans-acting regulatory proteins, known as transcription factors. Regulation of the complex patterns of gene expression observed both spatially and temporally, in all developing organisms, is thought to arise from the interaction of enhancer- and promoter-bound, general and tissue-specific transcription factors with DNA (Izawa T, Foster R and Chua N H, J. Mol. Biol. 230:1131-1144, 1993; Menkens A E, Schindler U and Cashmore A R, Trends in Biochem. Sci. 13:506-510, 1995). Developmental decisions in organisms as diverse as Drosophila melanogaster, Saccharomyces cerevisiae, Arabidopsis thaliana and Pinus radiata are regulated by transcription factors. These DNA-binding regulatory molecules have been shown to control the expression of genes responsible for the differentiation of different cell types, for example, the differentiation of leaf trichomes and xylem tissue in Arabidopsis thaliana, formation of endoderm from embryonic cells in Xenopus laevis and the initiation of gene expression in response to environmental and phytohoinional stress in plants (Yanagisawa S and Sheen J, The Plant Cell 10:75-89, 1998).

[0006] Transcription factors generally bind DNA in a sequence-specific manner and either activate or repress transcription initiation. The specific mechanisms of these interactions remain to be fully elucidated. At least three separate domains have been identified within transcription factors. One is essential for sequence-specific DNA recognition, one for the activation/repression of transcriptional initiation, and one for the formation of protein-protein interactions (such as dimerization). Four motifs, or domains, involved in DNA sequence recognition and/or transcription factor dimerization have been identified to date: zinc fingers; helix-turn-helix; leucine zipper; and helix-loop-helix. Both helix-loop-helix and leucine zipper protein motifs have been implicated in the binding of transcription factors to DNA via their ability to readily form homo- or hetero-dimers in vivo. “Activating” domains are rich in either proline, glutamine or acidic amino acids. It has been proposed that this net negative region of the transcription factor interacts with the TATA box-binding transcription factor TFIID, RNA polymerase, and/or another protein associated with the transcription apparatus.

[0007] Studies indicate that many plant transcription factors can be grouped into distinct classes based on their conserved DNA binding domains (Katagiri F and Chua N H, Trends Genet. 8:22-27, 1992; Menkens A E, Schindler U and Cashmore A R, Trends in Biochem. Sci. 13:506-510, 1995; Martin C and Paz-Ares J, Trends Genet. 13:67-73, 1997). Each member of these families interacts and binds with distinct DNA sequence motifs that are often found in multiple gene promoters controlled by different regulatory signals. Several classes of transcription factors that have been identified to date are described below.

[0008] The basic/leucine zipper (bZIP) is a conserved family of transcription factors defined by a basic/leucine zipper (bZIP) motif (Landschultz et al., Science 240:1759-1764, 1988; McKnight, Sci. Am. 264:54-64, 1991; Foster et al., FASEB J. 8[2]:192-200, 1994). Transcriptional regulation of gene expression is mediated by both the bZIPs and other families of transcription factors, through the concerted action of sequence-specific transcription factors that interact with regulatory elements residing in the promoter regions of the corresponding gene. The bZIP bipartite DNA binding structure consists of a region enriched in basic amino acids (basic region) adjacent to a leucine zipper that is characterized by several leucine residues regularly spaced at seven amino acid intervals (Vinson et al., Science 246:911-916, 1989). Whereas the basic region directly contacts the DNA, the leucine zipper mediates homodimerisation and heterodimerisation of protein monomers through a parallel interaction of the hydrophobic dimerization interfaces of two α-helices, resulting in a coiled-coil structure (O'Shea et al., Science 243:538-542, 1989; Science 254:539-544, 1991; Hu et al., Science 250:1400-1403, 1990; Rasmussen et al., Proc. Natl. Acad. Sci. USA 88:561-564, 1991).

[0009] Dof proteins are a relatively new class of transcription factor and are thought to mediate the regulation of some patterns of plant gene expression in part by combinatorial interactions between bZIP proteins and other types of transcription factors binding to closely linked sites. Such an example of this combinatorial interaction has been observed between bZIP and D of transcription factors (Singh, Plant Physiol. 118:1111-1120, 1998). These D of proteins possess a single zinc-finger DNA binding domain that is highly conserved in plants (Yanagisawa, Trends Plant Sci. 1:213, 1996). Specific binding of the D of protein to bZIP transcription factors has been demonstrated and it has been proposed that this specific interaction results in the stimulation of bZIP binding to DNA target sequences in plant promoters (Chen et al., Plant J. 10:955-966, 1996). Examples of such Do f/bZIP interactions have been reported in the literature, including for example, the Arabidopsis thaliana glutathionine S-transferase-6 gene (GST6) promoter which has been shown to contain several Dof-binding sites closely linked to the ocs element, a recognized bZIP binding site (Singh, Plant Physiol. 118:1111-1120, 1998).

[0010] The bZIP family of G-box binding factors from Arabidopsis (including GBF1, GBF2 and GBF3, for example) interact with the palindromic G-box motif (CCACGTGG). However, it has been demonstrated that the DNA binding specificity of such transcription factors, for example GBF1, may be influenced by the nature of the nucleotides flanking the ACGT core (Schindler et al., EMBO J. 11:1274-1289, 1992a). In vivo transient and transgenic plant expression studies have shown that these ACGT elements are necessary for maximal transcriptional activation and have been identified in a multitude of plant genes regulated by diverse environmental, physiological, and environmental cues. Classification of these transcription factors based upon their ability to bind to the ACGT core motif yielded a relatively diverse group of proteins, including, for example the CamV 35S promoter as-1-binding protein which exhibits DNA binding site requirements distinct from those proteins interacting with the G-box (Tabata et al., EMBO J. 10:1459-1467, 1991). Thus, in addition to defining the individual classes of bZIP proteins on the basis of their DNA binding specificity, such proteins can also be classified according to their heterodimerisation characteristics (Cao et al., Genes Dev. 5:1538-1552, 1991; Schindler et al., EMBO J. 11:1261-1273, 1992b).

[0011] Environmentally inducible promoters require the presence of two cis-acting elements, critical for promoter activity, one of which is the moderately conserved G-box (CCACGTGG) (deVetten et al., Plant Cell 4[10]:1295-1307, 1992). A mutation in one of the two elements abolishes or severely reduces the ability of the promoter to respond to environmental changes. The sequence of the second cis-acting element, positioned near the G-box, is not conserved among different environmentally-inducible promoters, but may be similar among promoters induced by the same signal. The spacing between the G-box and the second cis-acting element appears to be critical, suggesting a direct interaction between the respective binding factors (deVetten and Ferl, Int. J. Biochem. 26[9]:1055-1068, 1994; Ramachandran et al., Curr. Opin. Genet. Dev. 4[5]:642-646, 1994).

[0012] Basic helix-loop-helix zipper proteins represent an additional class of bZIP transcription factors described in the literature and include, for example, the Myc proteins. These proteins contain two regions characteristic of transcription factors: an N-terminal transactivation domain consisting of several phosphorylation sites, and a C-terminal basic helix-loop-helix (bHLH) leucine zipper motif known to mediate dimerization and sequence specific DNA binding via three distinct domains: the leucine zipper, helix-loop-helix, and basic regions.

[0013] The Myb family of transcription factors is a group of functionally diverse transcriptional activators found in both plants and animals that is characterized by a conserved amino-terminal DNA-binding domain containing either two (in plant species) or three (in animal species) imperfect tandem repeats of approximately 50 amino acids (Rosinski and Atchley, J. Mol. Evol. 46(1):74-83, 1998; Stober-Grasser et al., Oncogene 7[3]:589-596, 1992). Comparisons between the amino acid sequences of representative plant and mammalian MYB proteins indicate that there is a greater conservation between the same repeat from different proteins, than between the R2 and R3 repeats from the same protein (Martin and Paz-Ares, Trends Genet. 13[2]:67-73, 1997). More than 100 MYB genes have been reported from Arabidopsis thaliana (Romero et al., Plant J. 14[3]:273-284, 1998), representing the largest regulatory gene family currently known in plants. DNA-binding studies have demonstrated that there are differences, but also frequent overlaps, in binding specificity among plant MYB proteins, in line with the distinct but often related functions that are beginning to be recognized for these proteins. Studies involving the eight putative base-contacting residues in MYB DNA binding domains have revealed that at least six are fully conserved in all plant MYB proteins identified to date and the remaining two are conserved in at least 80% of these proteins (Martin and Paz-Ares, Trends Genet. 13[2]:67-73, 1997). Mutational analysis involving residues that do not contact bases have indicated that the sequence-specific binding capacity of MYBs is affected and this may account for some of the differences in the DNA-binding specificity between plant MYB proteins (Solan et al., J. Biol. Chem. 272[5]:2889-2895, 1997). This large-sized gene family may contribute to the regulatory flexibility underlying the developmental and metabolic plasticity displayed by plants.

[0014] Homeotic transcription factors have, in animals, been implicated in a number of developmental processes including, for example, the control of pattern formation in insects and vertebrate embryos and the specification of cell differentiation in many tissues (Ingham, Nature 335:25-34, 1988; McGinnis and Krumlauf, Cell 68:283-302, 1992). Homeodomain secondary structures are characterized by a distinctive helix-turn-helix motif initially identified in bacterial DNA binding domains. This helix-turn-helix sequence/structure motif spans approximately 20 amino acids and is characterized by two short helices separated by a sharp 90 degree bend or turn (Harrison and Aggarwal, Ann. Rev. Biochem. 59:933-969, 1990). This helix has been shown to bind in the major groove of the DNA helix.

[0015] Plant homeobox genes have been identified in a number of plant species including Arabidopsis thaliana, maize, parsley and soybean. Expression pattern analysis of maize homeobox gene family members suggests that these transcription factors may be involved in defining specific regions in the vegetative apical meristem, potentially involved in the initiation of leaf structures (Jackson et al., Development 120:405-413, 1994). Such observations imply that the plant homeobox genes, as for the animal homeobox genes, may be involved in the determination of cell fate.

[0016] Homeodomain-zipper (HD-zip) represents an additional family of homeodomain proteins. These homeodomain-zipper proteins (HD-zip) possess both the characteristic homeodomain linked to an additional leucine zipper dimerization motif. This family includes, for example, Athb-1 and Athb-2 (Sessa et al., EMBO J. 12:3507-3517, 1993) and Athb-4 (Carabelli et al., Plant J. 4:469-479, 1993).

[0017] The LIM domain is a specialized double-zinc finger motif found in a variety of proteins, in association with domains of divergent functions, such as the homeodomain (see the sunflower pollen-specific SF3 transcription factor: Baltz et al., Plant J. 2:713-721, 1992; or forming proteins composed primarily of LIM domains: Dawid et al., Trends Genet. 14[4]:156-162, 1998). LIM domains interact specifically with other LIM domains and with many different protein domains. LIM domains are thought to function as protein interaction modules, mediating specific contacts between members of functional complexes and modulating the activity of some of the constituent proteins. Nucleic acid binding by LIM domains, while suggested by structural considerations, remains an unproven possibility. However, it is possible that together with the homeodomain, the LIM domain could bind to the regulatory regions of developmentally controlled genes, as has been proposed for the paired box, a conserved sequence motif first identified in the paired (PRD) and gooseberry (GSB) homeodomain proteins from Drosophila (Triesman et al., Genes Dev. 5:594-604, 1991). The PRD box is also able to bind DNA in the absence of the homeodomain. LIM-domain proteins can be nuclear, cytoplasmic, or can shuttle between compartments. In the animal systems, several important LIM proteins have been shown to be associated with the cytoskeleton, having a role in adhesion-plaque and actin-microfilament organization. Among nuclear LIM proteins, the LIM homeodomain proteins form a major subfamily with important functions in cell lineage determination and pattern formation during animal development.

[0018] The AP2 (APETALA2) and EREBPs (ethylene-responsive element binding proteins) are the prototypic members of a family of transcription factors unique to plants, whose distinguishing characteristic is that they contain the so-called AP2 DNA-binding domain. AP2/EREBP genes form a large multigene family, and they play a variety of roles throughout the plant life cycle: from being key regulators of several developmental processes, like floral organ identity determination or control of leaf epidermal cell identity, to forming part of the mechanisms used by plants to respond to various types of biotic and environmental stress. In Arabidopsis thaliana, the homeotic gene APETALA2 (AP2) has been shown to control three salient processes during development: (1) the specification of flower organ identity and the regulation of floral organogenesis (Jofuku et al., Plant Cell 6:1211-1225, 1994); (2) establishment of flower meristem identity (Irish and Sussex, Plant Cell 2[8]:741-753, 1990); and (3) the temporal and spatial regulation of flower homeotic gene activity (Drews et al., Cell 65[6]:991-1002, 1991). DNA sequence analysis suggests that AP2 encodes a theoretical polypeptide of 432 aa, with a distinct 68 aa repeated motif termed the AP2 domain. This domain has been shown to be essential for AP2 functions and contains within the 68 aa, an eighteen amino acid core region that is predicted to form an amphipathic α-helix (Jofuku et al., Plant Cell 6:1211-1225, 1994). Ap2-like domain-containing transcription factors have been also been identified in both Arabidopsis thaliana (Okamuro et al., Proc. Natl. Acad. Sci. USA 94:7076-7081, 1997) and in tobacco with the identification of the ethylene responsive element binding proteins (EREBPs) (Ohme-Takagi and Shinshi, Plant Cell 7[2]:173-182, 1995). In Arabidopsis, these RAP2 (related to AP2) genes encode two distinct subfamilies of AP2 domain containing proteins designated AP2-like and EREBP-like (Okamuro et al., Proc. Natl. Acad. Sci. USA 94:7076-7081, 1997). In vitro DNA binding has not been shown to date using the RAP2 proteins; however, based upon the presence of two highly conserved motifs YRG and RAYD within the AP2 domain, it has been proposed that binding DNA binding occurs in a manner similar to that of AP2 proteins.

[0019] Zinc finger domains of the type Cys₂H is₂ appear to represent the most abundant DNA binding motif in eukaryotic transcription factors, with several thousand being identified to date (Berg and Shi, Science 271[5252]:1081-1085, 1996). A structural role for zinc in transcription factors was initially proposed in 1983 for the transcription factor IIIA (TFIIIA) (Hanas et al., J Biol. Chem. 258[23]:14120-14125, 1983). The Cys₂H is₂ Zinc finger domains are characterized by tandem arrays of sequences of C-x(2,4)-C-x(3)-[LIVMFYWC]-x(8)-H-x(3,5)-H (where X represents a variable amino acid). Structurally, the zinc finger consists of two antiparallel β strands followed by an α helix (Lee et al., Science 245[4918]:635-637, 1989). This structural arrangement allows for the cysteine and histidine side chains to coordinate the zinc with the three other conserved residues forming the hydrophobic core adjacent to the metal coordination unit (Berg and Shi, Science 271[5252]:1081-1085, 1996). Many proteins possessing a Cys₂H is₂ domain have been shown to interact with DNA in a sequence-specific manner. Crystal structure analysis of the mouse transcription factor Zif268 bound to a specific DNA target indicates that the zinc fingers in the protein/DNA complex reside in the major groove of the double helix and interacts with the DNA bases through amino acid side chains referred to as the contact residues (Pavletich and Pabo, Science 252[5007]:809-817, 1991). The orientations of the zinc finger domains with respect to the DNA are usually identical, with each domain contacting a contiguous 3-base pair subsite, the majority of which are directed to one strand. There are few interdomain interactions and the DNA recognition by each zinc finger appears to be largely independent of the other domains (Berg and Shi, Science 271[5252]:1081-1085, 1996).

[0020] The CCAAT-box element identified by Gelinas et al. (Nature 313[6000]:323-325, 1985) has been shown to occur between 80 bp and 300 bp from the transcription start site and may operate in either orientation, with possible cooperative interactions with multiple boxes (Tasanen et al., J Biol. Chem. 267[16]:11513-11519, 1992); or other conserved motifs (Muro et al., J. Biol. Chem. 267[18]:12767-12774, 1992; Rieping and Schoffl, Mol. Gen. Genet. 231[2]:226-232, 1992). CCAAT-box related motifs have been identified in a number of promoters in a variety of organisms including yeast (Hahn et al., Science 240[4850]:317-321, 1988), rat (Maity et al., Proc. Natl. Acad. Sci. USA 87[14]:5378-5382, 1990; Vuorio et al., J. Biol. Chem. 265[36]:22480-22486, 1990); and plants (Rieping and Schoffl, Mol. Gen. Genet. 231[2]:226-232, 1992; Kehoe et al., Plant Cell 6[8]:1123-1134, 1994). In both yeast and vertebrates, a protein complex has been shown to bind to the CCAAT-motif. In yeast the complex consists of three proteins, known as HAP2, HAP3 and HAPS (Pinkham and Guarente, Mol. Cell. Biol. 5[12]:3410-3416, 1985).

[0021] MADS box transcription factors interact with a conserved region of DNA known as the MADS box. All MADS box transcription factors contain a conserved DNA-binding/dimerization region, known as the MADS domain, which has been identified throughout the different kingdoms (Riechmann and Meyerowitz, Biol. Chem. 378[10]:1079-1101, 1997). Many of the MADS box genes isolated from plants are expressed primarily in floral meristems or floral organs, and are believed to play a role either in specifying inflorescence and floral meristem identity or in determining floral organ identity. One class of regulatory genes responsible for floral meristem identity and the pattern of meristem development includes the genes APETALA1 (AP1), APETALA2 (AP2), CAULIFLOWER (CAL), LEAFY (LFY) and AGAMOUS (AG) from Arabidopsis thaliana. Both LFY and AP1 have been shown to encode putative transcription factors (Weigel et al., Cell 69:843-859, 1992), with AP1 and AG each encoding putative transcription factors of the MADS box domain family (Yanofsky et al., Nature 346:35-39, 1990). Mutations in the Lfy gene have been shown to result in a partial conversion of flowers into infloresence shoots.

### SUMMARY OF THE INVENTION

[0022] Briefly, the present invention provides polynucleotides isolated from plants that encode transcription factors, together with polypeptides encoded by such polynucleotides. The isolated polynucleotides and polypeptides of the present invention may be usefully employed in the modification of gene expression in plants, since both tissue- and temporal-specific gene expression patterns have been shown to be governed by transcription factors during the natural development of a plant. The inventive polynucleotides and polypeptides may thus be employed in the manipulation of plant phenotypes.

[0023] In a first aspect, the present invention provides polynucleotides isolated from eucalyptus and pine which encode transcription factors, including transcription factors from the following families of regulatory proteins: bZIP; bZIP family of G-box binding factors; basic helix-loop-helix zipper (bHLH); homeotic/homeodomain/homeobox/MADS; homeodomain zipper (ZIP); LIM domain; AP2 and EREBs; zinc finger domains of type Cys2H is2; CCAAT box elements; and MYB. In specific embodiments, the isolated polynucleotides of the present invention comprise a DNA sequence selected from the group consisting of: (a) sequences recited in SEQ ID NOS: 1-591, 1183-1912, 1931-2106, 2371, 2374, 2377, 2385, 2387, 2389, 2391, 2393, 2395, 2397, 2399, 2401, 2403, 2405, 2407, 2409, 2411, 2413, 2415, 2417, 2419, and 2421; (b) complements of the sequences identified as SEQ ID NOS: 1-591, 1183-1912, 1931-2106, 2371, 2374, 2377, 2385, 2387, 2389, 2391, 2393, 2395, 2397, 2399, 2401, 2403, 2405, 2407, 2409, 2411, 2413, 2415, 2417, 2419, and 2421; (c) reverse complements of the sequences identified as SEQ ID NOS: 1-591, 1183-1912, 1931-2106, 2371, 2374, 2377, 2385, 2387, 2389, 2391, 2393, 2395, 2397, 2399, 2401, 2403, 2405, 2407, 2409, 2411, 2413, 2415, 2417, 2419, and 2421; (d) reverse sequences of the sequences identified as SEQ ID NOS: 1-591, 1183-1912, 1931-2106, 2371, 2374, 2377, 2385, 2387, 2389, 2391, 2393, 2395, 2397, 2399, 2401, 2403, 2405, 2407, 2409, 2411, 2413, 2415, 2417, 2419, and 2421; and (e) sequences having either 60%, 75%, 80%, 90% or 95% identity, as defined herein, to a sequence of (a)-(d).

[0024] In a further aspect, isolated polypeptides encoded by the inventive polynucleotides are provided. In specific embodiments, such polypeptides comprise an amino acid sequence selected from the group consisting of: (a) sequences provided in SEQ ID NOS: SEQ ID NOS: 592-1182, 1913-1930, 2107-2278, 2372, 2375, 2378, 2386, 2388, 2390, 2392, 2394, 2396, 2398, 2400, 2402, 2404, 2406, 2408, 2410, 2412, 2414, 2416, 2418, 2420, and 2422; and (b) sequences having either 60%, 75%, 80%, 90% or 95% identity, as defined herein, to a sequence of (a).

[0025] In another aspect, the present invention provides polypeptides isolated from eucalyptus and pine which comprise transcription factor DNA-binding domains. In specific embodiments, such polypeptides comprise an amino acid sequence selected from the group consisting of: (a) sequences provided in SEQ ID NOS: 2279-2293 and 2296-2368; and (b) sequences having either 60%, 75%, 80%, 90% or 95% identity, as defined herein, to a sequence of (a).

[0026] In a further aspect, the invention provides genetic constructs comprising a polynucleotide of the present invention, either alone, in combination with one or more other polynucleotides disclosed herein, or in combination with one or more known DNA sequences, together with transformed cells comprising such constructs.

[0027] In specific embodiments, the inventive genetic constructs comprise, in the 5′-3′ direction, a gene promoter sequence; an open reading frame coding for at least a functional portion of a polypeptide encoded by an inventive polynucleotide, or a variant thereof; and a gene termination sequence. The open reading frame may be orientated in either a sense or antisense direction. Genetic constructs comprising an untranslated, or non-coding, region of a polynucleotide coding for a transcription factor polypeptide of the present invention or a nucleotide sequence complementary to an untranslated region, together with a gene promoter sequence and a gene termination sequence, are also provided. Preferably, the gene promoter and termination sequences are functional in a host plant. Most preferably, the gene promoter and termination sequences are those of the original genes but others generally used in the art, such as the Cauliflower Mosaic Virus (CMV) promoter, with or without enhancers such as the Kozak sequence or Omega enhancer, and Agrobacterium tumefaciens nopalin synthase terminator may be usefully employed in the present invention. Tissue-specific promoters may be employed in order to target expression to one or more desired tissues. The genetic construct may further include a marker for the identification of transformed cells.

[0028] In yet a further aspect, transgenic cells comprising the genetic constructs of the present invention are provided, together with organisms, such as plants, comprising such transgenic cells. Fruits, seeds, derivatives, progeny, propagules and other products of such transgenic plants are also contemplated and encompassed by the present invention. As used herein, the term “propagule” means any part of a plant that may be used in reproduction or propagation, sexual or asexual, including cuttings.

[0029] In yet another aspect, methods for modifying gene expression in a target organism are provided, such methods including stably incorporating into the genome of the organism a genetic construct of the present invention. In a preferred embodiment, the target organism is a plant, preferably a woody plant, more preferably selected from the group consisting of eucalyptus and pine species, and most preferably from the group consisting of Eucalyptus grandis and Pinus radiata. In a related aspect, a method for producing a target organism, such as a plant, having modified gene expression is provided, the method comprising transforming a plant cell with a genetic construct of the present invention to provide a transgenic cell and cultivating the transgenic cell under conditions conducive to regeneration and mature plant growth.

[0030] The present invention further provides methods for modifying the activity of a transcription factor in a target organism, such as a plant, comprising stably incorporating into the genome of the plant a genetic construct of the present invention. In a preferred embodiment, the target plant is a woody plant, preferably selected from the group consisting of eucalyptus and pine species, and most preferably from the group consisting of Eucalyptus grandis and Pinus radiata.

[0031] The above-mentioned and additional features of the present invention and the manner of obtaining them will become apparent, and the invention will be best understood by reference to the following more detailed description. All references disclosed herein are hereby incorporated by reference in their entirety as if each was incorporated individually.

### DETAILED DESCRIPTION OF THE DRAWINGS

[0032] FIG. 1 depicts a map of the resulting plasmid, pWVK249 which is a binary vector used to transform plants and corresponds to SEQ ID: 2373.

[0033] FIG. 2 depicts a graph of basic gravity for wood from control and pWVK249-transformed cottonwood. The horizontal lines indicate the means for each set. The difference between the controls and the pWVK249 lines was significant at the 5% level.

### DETAILED DESCRIPTION OF THE INVENTION

[0034] The present invention provides isolated polynucleotides that encode plant transcription factors, together with isolated polypeptides encoded by such polynucleotides. As discussed above, transcription factors are components of the cellular “transcription apparatus” and are involved in the regulation of gene expression. Transcription factors are known to play a critical role in the growth and development of plants, and in cellular responses to external stimuli, such as environmental factors and disease pathogens. Transformation of plants with polynucleotides that encode proteins involved the cellular transcription process may thus be employed to modify properties such as lignin deposition, flower development, and male and female sterility. Transcription factors that regulate the formation of the vessel or fiber cells in secondary xylem or wood can be used to alter the characteristics of the wood. If the transcription factor up-regulates genes involved in lignin biosynthesis, overexpressing the transcription factor can increase the amount of lignin in the wood, while suppressing or knocking down the transcription factor can decrease the amount of lignin in wood. Certain transcription factors inhibit expression of genes involved in lignin formation and overexpression of one of these regulatory proteins would result in reduction of lignin. Overexpression of AmMYB308 from snapdragon led to reduction of lignin in transgenic tobacco (Tamagnone et al., Plant Cell 10: 135-154, 1998). Wood with high lignin is potentially useful as a fuel to be burned or converted to charcoal, while wood with low lignin is useful for pulping or conversion to ethanol. A transcription factor that up-regulates the full set of genes involved in cell wall biosynthesis can be used to alter the thickness of the cell walls and the density of the wood. Overexpressing the transcription factor can cause more production or prolonged production of the cell wall biosynthetic genes, resulting in cell walls that are thicker and wood that is denser and stronger. Goicoechea and co-workers showed that overexpression of a eucalyptus MYB gene in tobacco resulted in thicker cell walls and altered lignin composition (Plant J. 43: 553-567, 2005).

[0035] Using the methods and materials of the present invention, the amount of a specific transcription factor may be increased or reduced by incorporating additional copies of polynucleotides, or fragments of said polynucleotides, encoding the transcription factor into the genome of a target organism, such as a plant. Similarly, an increase or decrease in the amount of the transcription factor may be obtained by transfoiming the target plant with antisense copies of such genes.

[0036] In one embodiment, the present invention provides isolated polynucleotides encoding, or partially encoding, plant transcription factors that are involved in the regulation of gene expression. The polynucleotides of the present invention were isolated from forestry plant sources, namely from Eucalyptus grandis and Pinus radiata, but they may alternatively be synthesized using conventional synthesis techniques. In specific embodiments, isolated polynucleotides of the present invention comprise a sequence selected from the group consisting of sequences identified as SEQ ID NOS: 1-591, 1183-1912, 1931-2106, 2371, 2374, 2377, 2385, 2387, 2389, 2391, 2393, 2395, 2397, 2399, 2401, 2403, 2405, 2407, 2409, 2411, 2413, 2415, 2417, 2419, and 2421; complements of the sequences identified as SEQ ID NOS: 1-591, 1183-1912, 1931-2106, 2371, 2374, 2377, 2385, 2387, 2389, 2391, 2393, 2395, 2397, 2399, 2401, 2403, 2405, 2407, 2409, 2411, 2413, 2415, 2417, 2419, and 2421; reverse complements of the sequences identified as SEQ ID NOS: 1-591, 1183-1912, 1931-2106, 2371, 2374, 2377, 2385, 2387, 2389, 2391, 2393, 2395, 2397, 2399, 2401, 2403, 2405, 2407, 2409, 2411, 2413, 2415, 2417, 2419, and 2421; reverse sequences of the sequences identified as SEQ ID NOS: 1-591, 1183-1912, 1931-2106, 2371, 2374, 2377, 2385, 2387, 2389, 2391, 2393, 2395, 2397, 2399, 2401, 2403, 2405, 2407, 2409, 2411, 2413, 2415, 2417, 2419, and 2421; sequences comprising at least a specified number of contiguous residues (x-mers) of any of the above-mentioned polynucleotides; extended sequences corresponding to any of the above polynucleotides; antisense sequences corresponding to any of the above polynucleotides; and variants of any of the above polynucleotides, as that term is described in this specification.

[0037] In another embodiment, the present invention provides isolated polypeptides encoded by the polynucleotides of SEQ ID NOS: 1-591, 1183-1912, 1931-2106, 2371, 2374, 2377, 2385, 2387, 2389, 2391, 2393, 2395, 2397, 2399, 2401, 2403, 2405, 2407, 2409, 2411, 2413, 2415, 2417, 2419, and 2421. In certain specific embodiments, such isolated polypeptides comprise a sequence selected from the group consisting of SEQ ID NOS: 592-1182, 1913-1930, 2107-2278, 2372, 2375, 2378, 2386, 2388, 2390, 2392, 2394, 2396, 2398, 2400, 2402, 2404, 2406, 2408, 2410, 2412, 2414, 2416, 2418, 2420, and 2422.

[0038] The inventive polynucleotides and polypeptides have demonstrated similarity to transformation factors that are known to be involved in regulation of transcription and/or expression in plants as shown below in Table 1.

TABLE 1

| Transcription factor family | Polynucleotide SEQ ID NO: |
|---|---|
| Basic leucine zipper (bZIP) | 133, 148, 194, 206, 246, 258, 261, 265, |
| | 279, 284, 285, 286, 290, 294, 303, 318, |
| | 331, 455, 470, 473, 497, 501, 512, 533, |
| | 538, 554, 558, 575, 1896-1899, 1938, |
| | 1939, 1950, 1958, 1959, 1961, 1963, 1969, |
| | 1973, 1981, 1983, 1989, 1991, 1998, 2002, |
| | 2004, 2021, 2022, 2025, 2028, 2029, 2033- |
| | 2035, 2039, 2042, 2043, 2046, 2054, 2056, |
| | 2061, 2063, 2073, 2078, 2079, 2089, 2090, |
| | 2101, 2103, 2106 |
| bZIP family of G-box binding | 128, 136, 141, 142, 184, 202, 222, 244, |
| factors | 329, 541, 545 |
| Basic helix-loop-helix zipper | 157, 179, 223, 271, 274, 305, 317, 548, 563 |
| Myb | 138, 167, 214, 221, 232, 248, 252, 254, |
| | 255, 270, 276, 278, 280, 281, 282, 283, |
| | 292, 293, 315, 319, 328, 463, 483, 485, |
| | 486, 491, 492, 494, 502, 504, 507, 508, |
| | 510, 515, 518, 519, 520, 521, 527, 534, |
| | 536, 537, 540, 553, 559, 566, 572, 588, |
| | 1905, 1906, 1931, 1932, 1934-1936, 1940, |
| | 1948, 1949, 1951, 1953-1955, 1957, 1960, |
| | 1962, 1964-1968, 1974, 1975, 1977-1979, |
| | 1982, 1984-1988, 1992, 1994-1997, 2001, |
| | 2003, 2013-2015, 2024, 2026, 2027, 2030, |
| | 2032, 2036-2038, 2041, 2044, 2045, 2047- |
| | 2049, 2051, 2052, 2057-2060, 2065, 2067, |
| | 2071, 2072, 2074-2077, 2080-2088, 2104, |
| | 2105 |
| Homeotic/homeodomain/homeobox/ | 2, 3, 4, 7, 9, 10, 11, 12, 13, 17, 19, 25, 26, |
| MADS | 27, 28, 29, 31, 32, 34, 35, 36, 37, 39, 40, |
| | 44, 45, 49, 50, 51, 52, 54, 55, 57, 60, 62, |
| | 63, 64, 65, 66, 69, 72, 74, 76, 77, 79, 82, |
| | 84, 88, 89, 92, 94, 96, 97, 98, 100, 102, |
| | 103, 104, 105, 106, 107, 108, 11, 112, 114, |
| | 116, 117, 123, 125, 127, 168, 185, 249, |
| | 250, 332, 333, 334, 336, 337, 338, 340, |
| | 341, 343, 344, 345, 346, 347, 348, 349, |
| | 350, 351, 353, 354, 355, 356, 357, 359, |
| | 360, 361, 362, 364, 365, 366, 367, 368, |
| | 370, 371, 372, 373, 374, 375, 376, 379, |
| | 380, 383, 384, 385, 386, 387, 389, 392, |
| | 393, 394, 398, 399, 400, 401, 402, 403, |
| | 406, 408, 409, 410, 412, 414, 416, 417, |
| | 418, 420, 422, 424, 425, 426, 475, 526, |
| | 529, 580, 591, 1901, 1902, 1937, 1941- |

| | |
|---|---|
| | 1947, 1952, 1970-1972, 1976, 1980, 1990, |
| | 1993, 1999, 2000, 2006-2012, 2016-2020, |
| | 2023, 2031, 2040, 2050, 2053, 2055, 2062, |
| | 2064, 2066, 2068-2070, 2091-2100 |
| Homeodomain zipper (HDZIP) | 1, 5, 6, 14, 16,20, 21, 22, 23, 30, 33, 41, |
| | 42, 47, 58, 59, 61, 68, 70, 71, 73, 75, 80, |
| | 86, 87, 90, 91, 93, 115, 119, 121, 126, 335, |

339, 342, 352, 358, 363, 369, 377, 381,
388, 390, 396, 397, 415, 419, 421, 423,

| | |
|---|---|
| | 2005, 2102 |
| LIM domain | 15, 18, 24, 43, 78, 81, 83, 198, 210, 225, |

| | |
|---|---|
| | 273, 378, 391, 433, 437, 450, 452 |
| AP2 and EREBs | 120, 124, 170, 171, 219, 220, 224, 226, |
| | 229, 230, 238, 242, 243, 245, 247, 256, |
| | 301, 320, 330, 432, 434, 435, 436, 445, |
| | 447, 451, 453, 454, 459, 466, 469, 476, |
| | 481, 490, 524, 546, 549, 570, 1895 |
| Zinc finger domains of type | 132, 146, 154, 180, 181, 182, 183, 191, |
| Cys2His2 | 207, 227, 234, 288, 323, 324, 325, 326, |
| | 404, 535, 567, 584, 585, 586, 587, 589, 590 |
| CCAAT box elements | 155, 174, 266, 309, 431, 460, 484, 499, |

| | |
|---|---|
| | 542, 551, 574, 583 |
| Other transcription factors | 8, 38, 46, 48, 53, 56, 67, 85, 95, 99, 101, |

109, 110, 113, 118, 122, 129, 130, 131,
134, 135, 137, 139, 140, 143, 1444, 145,
147, 149, 150, 151, 152, 153, 156, 158,
159, 160, 161, 162, 163, 164, 165, 166,
169, 172, 173, 175, 176, 177, 178, 186,
187, 188, 189, 190, 192, 193, 195, 196,
197, 199, 200, 201, 203, 204, 205, 208,
209, 211, 212, 213, 215, 216, 217, 218,
228, 231, 233, 235, 236, 237, 239, 240,

241, 251, 253, 257, 259, 260, 262, 263,
264, 267, 268, 269, 272, 275, 277, 287,
289, 291, 295, 296, 297, 298, 299, 300,
302, 304, 306, 307, 308, 310, 311, 312,
313, 314, 316, 321, 322, 327, 382, 395,
405, 407, 411, 413, 427, 428, 429, 430,
438, 439, 440, 441, 442, 443, 444, 446,
449, 456, 457, 458, 461, 462, 464, 465,
467, 468, 471, 472, 474, 477, 478, 479,
480, 482, 487, 488, 489, 493, 495, 496,
498, 500, 505, 506, 509, 511, 513, 514,
516, 517, 522, 523, 525, 528, 530, 531,
532, 539, 543, 544, 547, 550, 552, 555,
556, 557, 560, 561, 562, 564, 565, 568,
569, 571, 573, 577, 578, 579, 581, 582,
448, 1183-1894, 1900, 1903, 1904, 1907,
1908-1912, 1933, 1956

[0039] The term “polynucleotide(s),” as used herein, means a single or double-stranded polymer of deoxyribonucleotide or ribonucleotide bases and includes DNA and corresponding RNA molecules, including HnRNA and mRNA molecules, both sense and anti-sense strands, and comprehends cDNA, genomic DNA and recombinant DNA, as well as wholly or partially synthesized polynucleotides. An HnRNA molecule contains introns and corresponds to a DNA molecule in a generally one-to-one manner. An mRNA molecule corresponds to an HnRNA and DNA molecule from which the introns have been excised. A polynucleotide may consist of an entire gene, or any portion thereof. Operable anti-sense polynucleotides may comprise a fragment of the corresponding polynucleotide, and the definition of “polynucleotide” therefore includes all such operable anti-sense fragments. Anti-sense polynucleotides and techniques involving anti-sense polynucleotides are well known in the art and are described, for example, in Robinson-Benion et al., “Antisense techniques,” Methods in Enzymol. 254[23]: 363-375, 1995; and Kawasaki et al., Artific. Organs 20[8]:836-848, 1996.

[0040] The definition of the terms “complement”, “reverse complement” and “reverse sequence”, as used herein, is best illustrated by the following example. For the sequence 5′ AGGACC 3′, the complement, reverse complement and reverse sequence are as follows:

| | |
|---|---|
| complement | 3′ TCCTGG 5′ |
| reverse complement | 3′ GGTCCT 5′ |
| reverse sequence | 5′ CCAGGA 3′. |

[0041] Preferably, sequences that are complements of a specifically recited polynucleotide sequence are complementary over the entire length of the specific polynucleotide sequence. The temi “polypeptide”, as used herein, encompasses amino acid chains of any length including full length proteins, wherein amino acid residues are linked by covalent peptide bonds. Polypeptides of the present invention may be naturally purified products, or may be produced partially or wholly using recombinant techniques. The term “polypeptide encoded by a polynucleotide” as used herein, includes polypeptides encoded by a nucleotide sequence which includes the partial isolated DNA sequences of the present invention.

[0042] All of the polynucleotides and polypeptides described herein are isolated and purified, as those terms are commonly used in the art. Preferably, the polypeptides and polynucleotides are at least about 80% pure, more preferably at least about 90% pure, and most preferably at least about 99% pure.

[0043] Some of the polynucleotides of the present invention are “partial” sequences, in that they do not represent a full length gene encoding a full length polypeptide. Such partial sequences may be extended by analyzing and sequencing various DNA libraries using primers and/or probes and well known hybridization and/or PCR techniques. Partial sequences may be extended until an open reading frame encoding a polypeptide, a full length polynucleotide and/or gene capable of expressing a polypeptide, or another useful portion of the genome is identified. Such extended sequences, including full length polynucleotides and genes, are described as “corresponding to” a sequence identified as one of the sequences of SEQ ID NOS: 1-591, 1183-1912, 1931-2106, 2371, 2374, 2377, 2385, 2387, 2389, 2391, 2393, 2395, 2397, 2399, 2401, 2403, 2405, 2407, 2409, 2411, 2413, 2415, 2417, 2419, and 2421, or a variant thereof, or a portion of one of the sequences of SEQ ID NOS: 1-591, 1183-1912, 1931-2106, 2371, 2374, 2377, 2385, 2387, 2389, 2391, 2393, 2395, 2397, 2399, 2401, 2403, 2405, 2407, 2409, 2411, 2413, 2415, 2417, 2419, and 2421, or a variant thereof, when the extended polynucleotide comprises an identified sequence or its variant, or an identified contiguous portion (x-mer) of one of the sequences of SEQ ID NOS: 1-591, 1183-1912, 1931-2106, 2371, 2374, 2377, 2385, 2387, 2389, 2391, 2393, 2395, 2397, 2399, 2401, 2403, 2405, 2407, 2409, 2411, 2413, 2415, 2417, 2419, and 2421, or a variant thereof. Such extended polynucleotides may have a length of from about 50 to about 4,000 nucleic acids or base pairs, and preferably have a length of less than about 4,000 nucleic acids or base pairs, more preferably yet a length of less than about 3,000 nucleic acids or base pairs, more preferably yet a length of less than about 2,000 nucleic acids or base pairs. Under some circumstances, extended polynucleotides of the present invention may have a length of less than about 1,800 nucleic acids or base pairs, preferably less than about 1,600 nucleic acids or base pairs, more preferably less than about 1,400 nucleic acids or base pairs, more preferably yet less than about 1,200 nucleic acids or base pairs, and most preferably less than about 1,000 nucleic acids or base pairs.

[0044] Similarly, RNA sequences, reverse sequences, complementary sequences, antisense sequences, and the like, corresponding to the polynucleotides of the present invention, may be routinely ascertained and obtained using the cDNA sequences identified as SEQ ID NOS: 1-591, 1183-1912, 1931-2106, 2371, 2374, 2377, 2385, 2387, 2389, 2391, 2393, 2395, 2397, 2399, 2401, 2403, 2405, 2407, 2409, 2411, 2413, 2415, 2417, 2419, and 2421.

[0045] The polynucleotides identified as SEQ ID NOS: 1-591, 1183-1912, 1931-2106, 2371, 2374, 2377, 2385, 2387, 2389, 2391, 2393, 2395, 2397, 2399, 2401, 2403, 2405, 2407, 2409, 2411, 2413, 2415, 2417, 2419, and 2421 may contain open reading frames (“ORFs”) or partial open reading frames encoding polypeptides. Open reading frames may be identified using techniques that are well known in the art. These techniques include, for example, analysis for the location of known start and stop codons, most likely reading frame identification based on codon frequencies, etc. Suitable tools and software for ORF analysis include, for example, GeneWise, available from The Sanger Center, Wellcome Trust Genome Campus, Hinxton, Cambridge, CB10 1SA, United Kingdom; Diogenes, available from Computational Biology Centers, University of Minnesota, Academic Health Center, UMHG Box 43 Minneapolis Minn. 55455; and GRAIL, available from the Informatics Group, Oak Ridge National Laboratories, Oak Ridge, Tenn. TN. Open reading frames and portions of open reading frames may be identified in the polynucleotides of the present invention. Once a partial open reading frame is identified, the polynucleotide may be extended in the area of the partial open reading frame using techniques that are well known in the art until the polynucleotide for the full open reading frame is identified. Thus, open reading frames encoding polypeptides may be identified using the polynucleotides of the present invention.

[0046] Once open reading frames are identified in the polynucleotides of the present invention, the open reading frames may be isolated and/or synthesized. Expressible genetic constructs comprising the open reading frames and suitable promoters, initiators, temiinators, etc., which are well known in the art, may then be constructed. Such genetic constructs may be introduced into a host cell to express the polypeptide encoded by the open reading frame. Suitable host cells may include various prokaryotic and eukaryotic cells, including plant cells, mammalian cells, bacterial cells, algae and the like.

[0047] Polypeptides encoded by the polynucleotides of the present invention may be expressed and used in various assays to determine their biological activity. Such polypeptides may be used to raise antibodies, to isolate corresponding interacting proteins or other compounds, and to quantitatively determine levels of interacting proteins or other compounds.

[0048] As used herein, the term “variant” comprehends nucleotide or amino acid sequences different from the specifically identified sequences, wherein one or more nucleotides or amino acid residues is deleted, substituted, or added. Variants may be naturally occurring allelic variants, or non-naturally occurring variants. Variant sequences (polynucleotide or polypeptide) preferably exhibit at least 50%, more preferably at least 75%, more preferably at least 85%, more preferably at least 90% and most preferably at least 95% identity to a sequence of the present invention. The percentage identity is determined by aligning the two sequences to be compared as described below, determining the number of identical residues in the aligned portion, dividing that number by the total number of residues in the inventive (queried) sequence, and multiplying the result by 100. By way of illustration only, assume an inventive polynucleotide having 220 nucleotides has a hit to a polynucleotide sequence in the EMBL database having 520 nucleotides over a stretch of 23 nucleotides in the alignment produced by the BLASTN algorithm using the parameters described above. The 23 nucleotide region includes 21 identical nucleotides, one gap and one different nucleotide. The percentage identity of the inventive polynucleotide to the hit in the EMBL library is thus 21/220 times 100, or 9.5%. The polynucleotide sequence in the EMBL database is thus not a variant of the inventive polynucleotide.

[0049] Polynucleotide and polypeptide sequences may be aligned, and percentage of identical residues in a specified region may be deteiinined against another polynucleotide or polypeptide sequence, using computer algorithms that are publicly available. Two exemplary algorithms for aligning and identifying the similarity of polynucleotide sequences are the BLASTN and FASTA algorithms. Polynucleotides may also be analyzed using the BLASTX algorithm, which compares the six-frame conceptual translation products of a nucleotide query sequence (both strands) against a protein sequence database. The similarity of polypeptide sequences may be examined using the BLASTP algorithm. The BLASTN, BLASTX and BLASTP programs are available on the NCBI anonymous FTP server, and from the National Center for Biotechnology Information (NCBI) National Library of Medicine, Building 38A, Room 8N8005, Bethesda, Md. 20894, USA. The BLASTN algorithm Version 2.0.4 [Feb. 24, 1998] and Version 2.0.6 [Sep. 16, 1998], set to the default parameters described in the documentation and distributed with the algorithm, are preferred for use in the determination of polynucleotide variants according to the present invention. The BLASTP algorithm is preferred for use in the determination of polypeptide variants according to the present invention. The use of the BLAST family of algorithms, including BLASTN, BLASTP, and BLASTX, is described at NCBI's Internet website and in the publication of Altschul et al., Nucleic Acids Res. 25:3389-3402, 1997.

[0050] The computer algorithm FASTA is available on the Internet, and from the University of Virginia by contacting David Hudson, Assistant Provost for Research, University of Virginia, PO Box 9025, Charlottesville, Va. Version 2.0u4 [Feb. 1996], set to the default parameters described in the documentation and distributed with the algorithm, may be used in the determination of variants according to the present invention. The use of the FASTA algorithm is described in Pearson and Lipman, Proc. Natl. Acad. Sci. USA 85:2444-2448, 1988; and Pearson, Methods in Enzymol. 183:63-98, 1990.

[0051] The following running parameters are preferred for determination of alignments and similarities using BLASTN that contribute to the E values and percentage identity for polynucleotide sequences: Unix running command: blastall -p blastn -d embldb -e 10 -G0 -E0-r 1 -v 30 -b 30 -i queryseq -o results; the parameters are: -p Program Name [String]; -d Database [String]; -e Expectation value (E) [Real]; -G Cost to open a gap (zero invokes default behavior) [Integer]; -E Cost to extend a gap (zero invokes default behavior) [Integer]; -r Reward for a nucleotide match (blastn only) [Integer]; -v Number of one-line descriptions (V) [Integer]; -b Number of alignments to show (B) [Integer]; -i Query File [File In]; and -o BLAST report Output File [File Out] Optional.

[0052] The following running parameters are preferred for determination of alignments and similarities using BLASTP that contribute to the E values and percentage identity of polypeptide sequences: blastall -p blastp -d swissprotdb -e 10 -G 0 -E 0 -v 30 -b 30 -i queryseq -o results; wherein the parameters are: -p Program Name [String]; -d Database [String]; -e Expectation value (E) [Real]; -G Cost to open a gap (zero invokes default behavior) [Integer]; -E Cost to extend a gap (zero invokes default behavior) [Integer]; -v Number of one-line descriptions (v) [Integer]; -b Number of alignments to show (b) [Integer]; -I Query File [File In]; -o BLAST report Output File [File Out] Optional.

[0053] The “hits” to one or more database sequences by a queried sequence produced by BLASTN, FASTA, BLASTP or a similar algorithm, align and identify similar portions of sequences. The hits are arranged in order of the degree of similarity and the length of sequence overlap. Hits to a database sequence generally represent an overlap over only a fraction of the sequence length of the queried sequence.

[0054] The BLASTN, FASTA and BLASTP algorithms also produce “Expect” values for alignments. The Expect value (E) indicates the number of hits one can “expect” to see over a certain number of contiguous sequences by chance when searching a database of a certain size. The Expect value is used as a significance threshold for determining whether the hit to a database, such as the preferred EMBL database, indicates true similarity. For example, an E value of 0.1 assigned to a polynucleotide hit is interpreted as meaning that in a database of the size of the EMBL database, one might expect to see 0.1 matches over the aligned portion of the sequence with a similar score simply by chance. By this criterion, the aligned and matched portions of the polynucleotide sequences then have a probability of 90% of being the same. For sequences having an E value of 0.01 or less over aligned and matched portions, the probability of finding a match by chance in the EMBL database is 1% or less using the BLASTN or FASTA algorithm.

[0055] According to one embodiment, “variant” polynucleotides and polypeptides, with reference to each of the polynucleotides and polypeptides of the present invention, preferably comprise sequences having the same number or fewer nucleic or amino acids than each of the polynucleotides or polypeptides of the present invention and producing an E value of 0.01 or less when compared to the polynucleotide or polypeptide of the present invention. That is, a variant polynucleotide or polypeptide is any sequence that has at least a 99% probability of being the same as the polynucleotide or polypeptide of the present invention, measured as having an E value of 0.01 or less using the BLASTN, FASTA, or BLASTP algorithms set at parameters described above.

[0056] Alternatively, variant polynucleotides of the present invention hybridize to the polynucleotide sequences recited in SEQ ID NOS: 1-591, 1183-1912, 1931-2106, 2371, 2374, 2377, 2385, 2387, 2389, 2391, 2393, 2395, 2397, 2399, 2401, 2403, 2405, 2407, 2409, 2411, 2413, 2415, 2417, 2419, and 2421, or complements, reverse sequences, or reverse complements of those sequences, under stringent conditions. As used herein, “stringent conditions” refers to prewashing in a solution of 6×SSC, 0.2% SDS; hybridizing at 65° C., 6×SSC, 0.2% SDS overnight; followed by two washes of 30 minutes each in 1×SSC, 0.1% SDS at 65° C. and two washes of 30 minutes each in 0.2×SSC, 0.1% SDS at 65° C.

[0057] The present invention also encompasses polynucleotides that differ from the disclosed sequences but that, as a consequence of the degeneracy of the genetic code, encode a polypeptide which is the same as that encoded by a polynucleotide of the present invention. Thus, polynucleotides comprising sequences that differ from the polynucleotide sequences recited in SEQ ID NOS: 1-591, 1183-1912, 1931-2106, 2371, 2374, 2377, 2385, 2387, 2389, 2391, 2393, 2395, 2397, 2399, 2401, 2403, 2405, 2407, 2409, 2411, 2413, 2415, 2417, 2419, and 2421; or complements, reverse sequences, or reverse complements thereof, as a result of conservative substitutions are contemplated by and encompassed within the present invention. Additionally, polynucleotides comprising sequences that differ from the polynucleotide sequences recited in SEQ ID NOS: 1-591, 1183-1912, 1931-2106, 2371, 2374, 2377, 2385, 2387, 2389, 2391, 2393, 2395, 2397, 2399, 2401, 2403, 2405, 2407, 2409, 2411, 2413, 2415, 2417, 2419, and 2421, or complements, reverse complements or reverse sequences thereof, as a result of deletions and/or insertions totaling less than 10% of the total sequence length are also contemplated by and encompassed within the present invention. Similarly, polypeptides comprising sequences that differ from the polypeptide sequences recited in SEQ ID NOS: 592-1182, 1913-1930, 2107-2278, 2372, 2375, 2378, 2386, 2388, 2390, 2392, 2394, 2396, 2398, 2400, 2402, 2404, 2406, 2408, 2410, 2412, 2414, 2416, 2418, 2420, and 2422 as a result of amino acid substitutions, insertions, and/or deletions totaling less than 10% of the total sequence length are contemplated by and encompassed within the present invention.

[0058] In addition to having a specified percentage identity to an inventive polynucleotide or polypeptide sequence, variant polynucleotides and polypeptides preferably have additional structure and/or functional features in common with the inventive polynucleotide or polypeptide. Polypeptides having a specified degree of identity to a polypeptide of the present invention share a high degree of similarity in their primary structure and have substantially similar functional properties. In addition to sharing a high degree of similarity in their primary structure to polynucleotides of the present invention, polynucleotides having a specified degree of identity to, or capable of hybridizing to an inventive polynucleotide preferably have at least one of the following features: (i) they contain an open reading frame, or partial open reading frame, encoding a polypeptide having substantially the same functional properties as the polypeptide encoded by the inventive polynucleotide; or (ii) they contain identifiable domains in common. Thus, in preferred embodiments, variants of the inventive polypeptides possess biological activities that are the same or similar to those of the inventive polypeptides. Such variant polypeptides function as transcription factors and are thus capable of modifying gene expression in a plant. Similarly, variant polynucleotides may encode polypeptides that function as transcription factors.

[0059] Polynucleotides of the present invention also comprehend polynucleotides comprising at least a specified number of contiguous residues (x-mers) of any of the polynucleotides identified as SEQ ID NOS: 1-591, 1183-1912, 1931-2106, 2371, 2374, 2377, 2385, 2387, 2389, 2391, 2393, 2395, 2397, 2399, 2401, 2403, 2405, 2407, 2409, 2411, 2413, 2415, 2417, 2419, and 2421, complements, reverse sequences, and reverse complements of such sequences, and their variants. Similarly, polypeptides of the present invention comprehend polypeptides comprising at least a specified number of contiguous residues (x-mers) of any of the polypeptides identified as SEQ ID NOS: 592-1182, 1913-1930, 2107-2278, 2372, 2375, 2378, 2386, 2388, 2390, 2392, 2394, 2396, 2398, 2400, 2402, 2404, 2406, 2408, 2410, 2412, 2414, 2416, 2418, 2420, and 2422, and their variants. As used herein, the term “x-mer,” with reference to a specific value of “x,” refers to a sequence comprising at least a specified number (“x”) of contiguous residues of any of the polynucleotides identified as SEQ ID NOS: 1-591, 1183-1912, 1931-2106, 2371, 2374, 2377, 2385, 2387, 2389, 2391, 2393, 2395, 2397, 2399, 2401, 2403, 2405, 2407, 2409, 2411, 2413, 2415, 2417, 2419, and 2421, or the polypeptides identified as SEQ ID NOS: 592-1182, 1913-1930, 2107-2278, 2372, 2375, 2378, 2386, 2388, 2390, 2392, 2394, 2396, 2398, 2400, 2402, 2404, 2406, 2408, 2410, 2412, 2414, 2416, 2418, 2420, and 2422. According to preferred embodiments, the value of x is preferably at least 20, more preferably at least 40, more preferably yet at least 60, and most preferably at least 80. Thus, polynucleotides and polypeptides of the present invention comprise a 20-mer, a 40-mer, a 60-mer, an 80-mer, a 100-mer, a 120-mer, a 150-mer, a 180-mer, a 220-mer, a 250-mer, a 300-mer, a 400-mer, a 500-mer or a 600-mer of a polynucleotide or polypeptide identified as SEQ ID NOS: 1-2372, 2374, 2375, 2377, 2378, 2385, 2386, 2387, 2388, 2389, 2390, 2391, 2392, 2393, 2394, 2395, 2396, 2397, 2398, 2399, 2400, 2401, 2402, 2403, 2404, 2405, 2406, 2407, 2408, 2409, 2410, 2411, 2412, 2413, 2414, 2415, 2416, 2417, 2418, 2419, 2420, 2421, and 2422 and variants thereof.

[0060] The inventive polynucleotides may be isolated by high throughput sequencing of cDNA libraries prepared from Eucalyptus grandis and Pinus radiata as described below in Examples 1 and 2. Alternatively, oligonucleotide primer and probes based on the sequences provided in SEQ ID NOS: 1-591, 1183-1912, 1931-2106, 2371, 2374, 2377, 2385, 2387, 2389, 2391, 2393, 2395, 2397, 2399, 2401, 2403, 2405, 2407, 2409, 2411, 2413, 2415, 2417, 2419, and 2421 may be prepared as detailed below and used to identify positive clones in either cDNA or genomic DNA libraries from Eucalyptus grandis and Pinus radiata by means of hybridization or PCR techniques. Probes may be shorter than the sequences provided herein but should be at least about 10, preferably at least 15, and most preferably at least about 20 nucleotides in length. Hybridization and PCR techniques suitable for use with such oligonucleotides are well known in the art, and include those taught by Sambrook et al., Ibid. Positive clones may be analyzed by restriction enzyme digestion, DNA sequencing or the like.

[0061] The polynucleotides of the present invention may alternatively be synthesized using techniques that are well known in the art. The polynucleotides may be synthesized, for example, using automated oligonucleotide synthesizers (e.g., Beckman Oligo 1000M DNA Synthesizer) to obtain polynucleotide segments of up to 50 or more nucleic acids. A plurality of such polynucleotide segments may then be ligated using standard DNA manipulation techniques that are well known in the art of molecular biology. One conventional and exemplary polynucleotide synthesis technique involves synthesis of a single stranded polynucleotide segment having, for example, 80 nucleic acids, and hybridizing that segment to a synthesized complementary 85 nucleic acid segment to produce a 5 nucleotide overhang. The next segment may then be synthesized in a similar fashion, with a 5 nucleotide overhang on the opposite strand. The “sticky” ends ensure proper ligation when the two portions are hybridized. In this way, a complete polynucleotide of the present invention may be synthesized entirely in vitro.

[0062] In certain embodiments, the genetic constructs of the present invention include an open reading frame coding for at least a functional portion of a polypeptide of the present invention or a variant thereof. As used herein, the “functional portion” of a polypeptide is that portion which contains the active site essential for regulating gene expression, i.e., the portion of the molecule that is capable of binding to, or interacting with, the promoter of the gene to be expressed. The DNA-binding domain(s) for certain of the inventive polypeptides are identified below in Table 2. These DNA binding domains were identified using PROSITE 15.0 pattern or profile sequences as listed in the PROSITE database. PROSITE is available on the internet and its use is described in Hofman et al., Nucleic Acids Res. 27:215-219, 1999; and in Bairoch, Nucleic Acids Res. 20:Suppl. 2013-2018, 1992.

TABLE 2

| Polynucleotide | DNA-binding Domain(s) |
|---|---|
| SEQ ID NO: | SEQ ID NO: |
| 1931 | 2283 |
| 1934 | 2284, 2285 |
| 1940 | 2288 |
| 1949 | 2293 |
| 1951 | 2279, 2280 |
| 1953 | 2296, 2297 |
| 1957 | 2298 |
| 1960 | 2301, 2302 |
| 1962 | 2307 |
| 1965 | 2308, 2309 |
| 1967 | 2281, 2282 |
| 1978 | 2320 |
| 1979 | 2321 |
| 1982 | 2322, 2323 |
| 1986 | 2324 |
| 1992 | 2335 |
| 1994 | 2336, 2337 |
| 1995 | 2338, 2339 |
| 1997 | 2340 |
| 2003 | 2286, 2287 |
| 2013 | 2289, 2290 |
| 2020 | 2291, 2292 |
| 2027 | 2299, 2300 |
| 2030 | 2303, 2304 |
| 2032 | 2305, 2306 |
| 2036 | 2310, 2311 |
| 2038 | 2312, 2313 |
| 2049 | 2314, 2315 |
| 2051 | 2316, 2317 |
| 2052 | 2318, 2319 |
| 2057 | 2325, 2326 |
| 2059 | 2327, 2328 |
| 2060 | 2329, 2330 |
| 2065 | 2331, 2332 |
| 2067 | 2333, 2334 |
| 2074 | 2342, 2343 |
| 2075 | 2344, 2345 |
| 2076 | 2346, 2347 |
| 2077 | 2348, 2349 |
| 2080 | 2352 |
| 2081 | 2353 |
| 2082 | 2354 |
| 2083 | 2355, 2356 |
| 2084 | 2357, 2358 |
| 2085 | 2359, 2360 |
| 2086 | 2361, 2362 |
| 2087 | 2365, 2366 |
| 2088 | 2367, 2368 |
| 2104 | 2350, 2351 |
| 2105 | 2363, 2364 |

[0063] The functional portion of a polypeptide may also be determined by targeted mutagenesis and screening of modified protein products with protocols well known in the art (Solano et al., J. Biol. Chem. 272:2889-95, 1997). The active site will generally exhibit high substrate specificity. Portions of the inventive polypeptides may be generated by synthetic or recombinant means. Synthetic polypeptides having fewer than about 100 amino acids, and generally fewer than about 50 amino acids, may be generated using techniques well known to those of ordinary skill in the art. For example, such polypeptides may be synthesized using any of the commercially available solid-phase techniques, such as the Merrifield solid-phase synthesis method, where amino acids are sequentially added to a growing amino acid chain. See Merrifield, J. Am. Chem. Soc. 85:2149-2154, 1963. Equipment for automated synthesis of polypeptides is commercially available from suppliers such as Perkin Elmer/Applied BioSystems, Inc. (Foster City, Calif.), and may be operated according to the manufacturer's instructions.

[0064] An open reading frame may be inserted in the genetic construct in a sense or antisense orientation, such that transfoimation of a target plant with the genetic construct will lead to a change in the amount of polypeptide compared to the wild-type plant. Transformation with a genetic construct comprising an open reading frame in a sense orientation will generally result in over-expression of the selected gene, while transformation with a genetic construct comprising an open reading frame in an antisense orientation will generally result in reduced expression of the selected gene. A population of plants transformed with a genetic construct comprising an open reading frame of the present invention in either a sense or antisense orientation may be screened for increased or reduced expression of the gene in question using techniques well known to those of skill in the art, and plants having the desired phenotypes may thus be isolated.

[0065] Alternatively, expression of a gene encoding a plant transcription factor may be inhibited by inserting a portion of an open reading frame of the present invention, in either sense or antisense orientation, in the genetic construct. Such portions need not be full-length but preferably comprise at least 25, and more preferably at least 50, residues of an inventive DNA sequence. A much longer portion or even the full length DNA corresponding to the complete open reading frame may be employed. The portion of the open reading frame does not need to be precisely the same as the endogenous sequence, provided that there is sufficient sequence similarity to achieve inhibition of the target gene. Thus a sequence derived from one species may be used to inhibit expression of a gene in a different species. A population of plants transformed with a genetic construct comprising an open reading frame of the present invention in either a sense or antisense orientation may be screened for increased or reduced expression of the gene in question using techniques well known to those of skill in the art, and plants having the desired phenotypes may thus be isolated.

[0066] In another embodiment, the inventive genetic constructs comprise a DNA sequence including an untranslated, or non-coding, region of a gene coding for a polypeptide of the present invention, or a DNA sequence complementary to such an untranslated region. Examples of untranslated regions which may be usefully employed in such constructs include introns and 5′-untranslated leader sequences. Transformation of a target plant with such a genetic construct may lead to a reduction in the amount of the polypeptide expressed in the plant by the process of cosuppression, in a manner similar to that discussed, for example, by Napoli et al. (Plant Cell 2:279-290, 1990), and de Carvalho Niebel et al. (Plant Cell 7:347-358, 1995).

[0067] Alternatively, regulation of polypeptide expression can be achieved by inserting appropriate sequences or subsequences (e.g. DNA or RNA) in ribozyme constructs (McIntyre and Manners, Transgenic Res. 5[4]:257-262, 1996). Ribozymes are synthetic RNA molecules that comprise a hybridizing region complementary to two regions, each of which comprises at least 5 contiguous nucleotides in a mRNA molecule encoded by one of the inventive polynucleotides. Ribozymes possess highly specific endonuclease activity, which autocatalytically cleaves the mRNA.

[0068] The genetic constructs of the present invention further comprise a gene promoter sequence and a gene termination sequence, operably linked to the DNA sequence to be transcribed, which control expression of the gene. The gene promoter sequence is generally positioned at the 5′ end of the DNA sequence to be transcribed, and is employed to initiate transcription of the DNA sequence. Gene promoter sequences are generally found in the 5′ untranslated region of a gene but they may exist downstream of the open reading frame, in introns (Luehrsen, Mol. Gen. Genet. 225:81-93, 1991) or in the coding region, as for example in a plant defence gene (Douglas et al., EMBO J. 10:1767-1775, 1991). When the construct includes an open reading frame in a sense orientation, the gene promoter sequence also initiates translation of the open reading frame. For genetic constructs comprising either an open reading frame in an antisense orientation or an untranslated region, the gene promoter sequence may consist only of a transcription initiation site having a RNA polymerase binding site.

[0069] A variety of gene promoter sequences which may be usefully employed in the genetic constructs of the present invention are well known in the art. The gene promoter sequence, and also the gene termination sequence, may be endogenous to the target plant host or may be exogenous, provided the promoter is functional in the target host. For example, the promoter and termination sequences may be from other plant species, plant viruses, bacterial plasmids and the like. Preferably, gene promoter and teimination sequences are from the inventive sequences themselves.

[0070] Factors influencing the choice of promoter include the desired tissue specificity of the construct, and the timing of transcription and translation. For example, constitutive promoters, such as the 35S Cauliflower Mosaic Virus (CaMV 35S) promoter, will affect the activity of the enzyme in all parts of the plant. Use of a tissue specific promoter will result in production of the desired sense or antisense RNA only in the tissue of interest. With genetic constructs employing inducible gene promoter sequences, the rate of RNA polymerase binding and initiation can be modulated by external stimuli, such as light, heat, anaerobic stress, alteration in nutrient conditions and the like. Temporally regulated promoters can be employed to effect modulation of the rate of RNA polymerase binding and initiation at a specific time during development of a transformed cell. Preferably, the original promoters from the enzyme gene in question, or promoters from a specific tissue-targeted gene in the organism to be transformed, such as eucalyptus or pine are used. Other examples of gene promoters which may be usefully employed in the present invention include mannopine synthase (mas), octopine synthase (ocs) and those reviewed by Chua et al. (Science 244:174-181, 1989).

[0071] The gene termination sequence, which is located 3′ to the DNA sequence to be transcribed, may come from the same gene as the gene promoter sequence or may be from a different gene. Many gene termination sequences known in the art may be usefully employed in the present invention, such as the 3′ end of the Agrobacterium tumefaciens nopaline synthase gene. However, preferred gene terminator sequences are those from the original gene or from the target species to be transformed.

[0072] The genetic constructs of the present invention may also contain a selection marker that is effective in cells of the target organism, such as a plant, to allow for the detection of transformed cells containing the inventive construct. Such markers, which are well known in the art, typically confer resistance to one or more toxins. One example of such a marker is the NPTII gene whose expression results in resistance to kanamycin or hygromycin, antibiotics which are usually toxic to plant cells at a moderate concentration (Rogers et al., in Weissbach, A and Weissbach H, eds., Methods for Plant Molecular Biology, Academic Press Inc.: San Diego, Calif., 1988). Transformed cells can thus be identified by their ability to grow in media containing the antibiotic in question. Alternatively, the presence of the desired construct in transformed cells can be determined by means of other techniques well known in the art, such as Southern and Western blots.

[0073] A transcription initiation site is additionally included in the genetic construct when the sequence to be transcribed lacks such a site.

[0074] Techniques for operatively linking the components of the inventive genetic constructs are well known in the art and include the use of synthetic linkers containing one or more restriction endonuclease sites as described, for example, by Sambrook et al., (Molecular cloning: a laboratory manual, CSHL Press: Cold Spring Harbor, N.Y., 1989). The genetic construct of the present invention may be linked to a vector having at least one replication system, for example E. coli, whereby after each manipulation, the resulting construct can be cloned and sequenced and the correctness of the manipulation determined.

[0075] The genetic constructs of the present invention may be used to transform a variety of target organisms including, but not limited to, plants. Plants which may be transformed using the inventive constructs include both monocotyledonous angiosperms (e.g., grasses, corn, grains, oat, wheat and barley); and dicotyledonous angiosperms (e.g., Arabidopsis, tobacco, legumes, alfalfa, oaks, eucalyptus, maple); and gymnosperms (e.g., Scots pine; Aronen, Finnish Forest Res. Papers, Vol. 595, 1996); white spruce (Ellis et al., Biotechnology 11:84-89, 1993); and larch (Huang et al., In Vitro Cell 27:201-207, 1991). In a preferred embodiment, the inventive genetic constructs are employed to transform woody plants, herein defined as a tree or shrub whose stem lives for a number of years and increases in diameter each year by the addition of woody tissue. Preferably the target plant is selected from the group consisting of eucalyptus and pine species, most preferably from the group consisting of Eucalyptus grandis and Pinus radiata. Other species which may be usefully transformed with the genetic constructs of the present invention include, but are not limited to: pines such as Pinus banksiana, Pinus brutia, Pinus caribaea, Pinus clausa, Pinus contorta, Pinus coulteri, Pinus echinata, Pinus eldarica, Pinus ellioti, Pinus jeffreyi, Pinus lambertiana, Pinus monticola, Pinus nigra, Pinus palustrus, Pinus pinaster, Pinus ponderosa, Pinus resinosa, Pinus rigida, Pinus serotina, Pinus strobus, Pinus sylvestris, Pinus taeda, Pinus virginiana; other gymnosperms, such as Abies amabilis, Abies balsamea, Abies concolor, Abies grandis, Abies lasiocarpa, Abies magnifica, Abies procera, Chamaecyparis lawsoniona, Chamaecyparis nootkatensis, Chamaecyparis thyoides, Huniperus virginiana, Larix decidua, Larix laricina, Larix leptolepis, Larix occidentalis, Larix siberica, Libocedrus decurrens, Picea abies, Picea engelmanni, Picea glauca, Picea mariana, Picea pungens, Picea rubens, Picea sitchensis, Pseudotsuga menziesii, Sequoia gigantea, Sequoia sempervirens, Taxodium distichum, Tsuga canadensis, Tsuga heterophylla, Tsuga mertensiana, Thuja occidentalis, Thuja plicata; and Eucalypts, such as Eucalyptus alba, Eucalyptus bancroftii, Eucalyptus botyroides, Eucalyptus bridgesiana, Eucalyptus calophylla, Eucalyptus camaldulensis, Eucalyptus citriodora, Eucalyptus cladocalyx, Eucalyptus coccifera, Eucalyptus curtisii, Eucalyptus dalrympleana, Eucalyptus deglupta, Eucalyptus delagatensis, Eucalyptus diversicolor, Eucalyptus dunnii, Eucalyptus ficifolia, Eucalyptus globulus, Eucalyptus gomphocephala, Eucalyptus gunnii, Eucalyptus henryi, Eucalyptus laevopinea, Eucalyptus macarthurii, Eucalyptus macrorhyncha, Eucalyptus maculata, Eucalyptus marginata, Eucalyptus megacarpa, Eucalyptus melliodora, Eucalyptus nicholii, Eucalyptus nitens, Eucalyptus nova-anglica, Eucalyptus obliqua, Eucalyptus obtusiflora, Eucalyptus oreades, Eucalyptus pauciflora, Eucalyptus polybractea, Eucalyptus regnans, Eucalyptus resinifera, Eucalyptus robusta, Eucalyptus rudis, Eucalyptus saligna, Eucalyptus sideroxylon, Eucalyptus stuartiana, Eucalyptus tereticornis, Eucalyptus torelliana, Eucalyptus urnigera, Eucalyptus urophylla, Eucalyptus viminalis, Eucalyptus viridis, Eucalyptus wandoo and Eucalyptus youmanni; and hybrids of any of these species.

[0076] Techniques for stably incorporating genetic constructs into the genome of target plants are well known in the art and include Agrobacterium tumefaciens mediated introduction, electroporation, protoplast fusion, injection into reproductive organs, injection into immature embryos, high velocity projectile introduction and the like. The choice of technique will depend upon the target plant to be transformed. For example, dicotyledonous plants and certain monocots and gymnospelins may be transformed by Agrobacterium Ti plasmid technology, as described, for example by Bevan (Nucleic Acids Res. 12:8711-8721, 1984). Targets for the introduction of the genetic constructs of the present invention include tissues, such as leaf tissue, dissociated cells, protoplasts, seeds, embryos, meristematic regions; cotyledons, hypocotyls, and the like. The preferred method for transforming eucalyptus and pine is a biolistic method using pollen (see, for example, Aronen, in Finnish Forest Res. Papers 595:53, 1996) or easily regenerable embryonic tissues.

[0077] Once the cells are transformed, cells having the inventive genetic construct incorporated in their genome may be selected by means of a marker, such as the kanamycin resistance marker discussed above. Transgenic cells may then be cultured in an appropriate medium to regenerate whole plants, using techniques well known in the art. In the case of protoplasts, the cell wall is allowed to reform under appropriate osmotic conditions. In the case of seeds or embryos, an appropriate germination or callus initiation medium is employed. For explants, an appropriate regeneration medium is used. Regeneration of plants is well established for many species. For a review of regeneration of forest trees see Dunstan et al., “Somatic embryogenesis in woody plants,” in Thorpe T A, ed., In vitro embryogenesis of plants (Current Plant Science and Biotechnology in Agriculture, 20[12]:471-540, 1995. Specific protocols for the regeneration of spruce are discussed by Roberts et al. (“Somatic embryogenesis of spruce,” in Redenbaugh K, ed., Synseed: applications of synthetic seed to crop improvement, CRC Press: 23:427-449, 1993). Transformed plants having the desired phenotype may be selected using techniques well known in the art. The resulting transformed plants may be reproduced sexually or asexually, using methods well known in the art, to give successive generations of transgenic plants.

[0078] As discussed above, the production of RNA in target cells can be controlled by choice of the promoter sequence, or by selecting the number of functional copies or the site of integration of the DNA sequences incorporated into the genome of the target host. A target organism may be transformed with more than one genetic construct of the present invention, thereby modulating the activity of more than one transcription factor, for example affecting gene expression in more than one tissue, or at more than one time in the development of the target organism. Similarly, a genetic construct may be assembled containing more than one open reading frame coding for a polypeptide of the present invention or more than one untranslated region of a gene coding for such a polypeptide. The polynucleotides of the present inventive may also be employed in combination with other known sequences encoding transcription factors.

[0079] Polynucleotides of the present invention may also be used to specifically suppress gene expression by methods that operate post-transcriptionally to block the synthesis of products of targeted genes, such as RNA interference (RNAi), and quelling. For a review of techniques of gene suppression see Science, 288:1370-1372, 2000. Exemplary gene silencing methods are also provided in WO 99/49029 and WO 99/53050. Posttranscriptional gene silencing is brought about by a sequence-specific RNA degradation process that results in the rapid degradation of transcripts of sequence-related genes. Studies have provided evidence that double-stranded RNA may act as a mediator of sequence-specific gene silencing (see, e.g., review by Montgomery and Fire, Trends in Genetics, 14:255-258, 1998). Gene constructs that produce transcripts with self-complementary regions are particularly efficient at gene silencing. A unique feature of this posttranscriptional gene silencing pathway is that silencing is not limited to the cells where it is initiated. The gene-silencing effects may be disseminated to other parts of an organism and even transmitted through the germ line to several generations.

[0080] The polynucleotides of the present invention may be employed to generate gene silencing constructs and or gene-specific self-complementary RNA sequences that can be delivered by conventional art-known methods to plant tissues, such as forestry tree tissues. Within genetic constructs, sense and antisense sequences can be placed in regions flanking an intron sequence in proper splicing orientation with donor and acceptor splicing sites, such that intron sequences are removed during processing of the transcript, and sense and antisense sequences, as well as splice junction sequences, bind together to form double-stranded RNA. Alternatively, spacer sequences of various lengths may be employed to separate self-complementary regions of sequence in the construct. During processing of the gene construct transcript, intron sequences are spliced-out, allowing sense and anti-sense sequences, as well as splice junction sequences, to bind forming double-stranded RNA. Select ribonucleases bind to and cleave the double-stranded RNA, thereby initiating the cascade of events leading to degradation of specific mRNA gene sequences, and silencing specific genes. Alternatively, rather than using a gene construct to express the self-complementary RNA sequences, the gene-specific double-stranded RNA segments are delivered to one or more targeted areas to be internalized into the cell cytoplasm to exert a gene silencing effect. Gene silencing RNA sequences comprising the polynucleotides of the present invention are useful for creating genetically modified plants with desired phenotypes as well as for characterizing genes (e.g., in high-throughput screening of sequences), and studying their functions in intact organisms.

[0081] Oligonucleotide probes and primers complementary to and/or corresponding to SEQ ID NOS: 1-591, 1183-1912, 1931-2106, 2371, 2374, 2377, 2385, 2387, 2389, 2391, 2393, 2395, 2397, 2399, 2401, 2403, 2405, 2407, 2409, 2411, 2413, 2415, 2417, 2419, and 2421, and variants of those sequences, are also comprehended by the present invention. Such oligonucleotide probes and primers are substantially complementary to the polynucleotide of interest. As used herein, the term “oligonucleotide” refers to a relatively short segment of a polynucleotide sequence, generally comprising between 6 and 60 nucleotides, and comprehends both probes for use in hybridization assays and primers for use in the amplification of DNA by polymerase chain reaction. An oligonucleotide probe or primer is described as “corresponding to” a polynucleotide of the present invention, including one of the sequences set out as SEQ ID NOS: 1-591, 1183-1912, 1931-2106, 2371, 2374, 2377, 2385, 2387, 2389, 2391, 2393, 2395, 2397, 2399, 2401, 2403, 2405, 2407, 2409, 2411, 2413, 2415, 2417, 2419, and 2421, or a variant, if the oligonucleotide probe or primer, or its complement, is contained within one of the sequences set out as SEQ ID NOS: 1-591, 1183-1912, 1931-2106, 2371, 2374, 2377, 2385, 2387, 2389, 2391, 2393, 2395, 2397, 2399, 2401, 2403, 2405, 2407, 2409, 2411, 2413, 2415, 2417, 2419, and 2421, or a variant of one of the specified sequences.

[0082] Two single stranded sequences are said to be substantially complementary when the nucleotides of one strand, optimally aligned and compared, with the appropriate nucleotide insertions and/or deletions, pair with at least 80%, preferably at least 90% to 95%, and more preferably at least 98% to 100%, of the nucleotides of the other strand. Alternatively, substantial complementarity exists when a first DNA strand will selectively hybridize to a second DNA strand under stringent hybridization conditions. Stringent hybridization conditions for determining complementarity include salt conditions of less than about 1 M, more usually less than about 500 mM, and preferably less than about 200 mM. Hybridization temperatures can be as low as 5° C., but are generally greater than about 22° C., more preferably greater than about 30° C., and most preferably greater than about 37° C. Longer DNA fragments may require higher hybridization temperatures for specific hybridization. Since the stringency of hybridization may be affected by other factors such as probe composition, presence of organic solvents and extent of base mismatching, the combination of parameters is more important than the absolute measure of any one alone. The DNA from plants or samples or products containing plant material can be either genomic DNA or DNA derived by preparing cDNA from the RNA present in the sample.

[0083] In addition to DNA-DNA hybridization, DNA-RNA or RNA-RNA hybridization assays are also possible. In the first case, the mRNA from expressed genes would then be detected instead of genomic DNA or cDNA derived from mRNA of the sample. In the second case, RNA probes could be used. In addition, artificial analogs of DNA hybridizing specifically to target sequences could also be used.

[0084] In specific embodiments, the oligonucleotide probes and/or primers comprise at least about 6 contiguous residues, more preferably at least about 10 contiguous residues, and most preferably at least about 20 contiguous residues complementary to a polynucleotide sequence of the present invention. Probes and primers of the present invention may be from about 8 to 100 base pairs in length or, preferably from about 10 to 50 base pairs in length or, more preferably from about 15 to 40 base pairs in length. The probes can be easily selected using procedures well known in the art, taking into account DNA-DNA hybridization stringencies, annealing and melting temperatures, and potential for formation of loops and other factors, which are well known in the art. Tools and software suitable for designing probes and PCR primers, are available on the Internet. An exemplary software program suitable for designing probes, and especially for designing PCR primers, is available from Premier Biosoft International, 3786 Corina Way, Palo Alto, Calif. 94303-4504. Preferred techniques for designing PCR primers are also disclosed in Dieffenbach and Dyksler, PCR primer: a laboratory manual, CSHL Press: Cold Spring Harbor, N.Y., 1995.

[0085] A plurality of oligonucleotide probes or primers corresponding to a polynucleotide of the present invention may be provided in a kit form. Such kits generally comprise multiple DNA or oligonucleotide probes, each probe being specific for a polynucleotide sequence. Kits of the present invention may comprise one or more probes or primers corresponding to a polynucleotide of the present invention, including a polynucleotide sequence identified in SEQ ID NOS: 1-591, 1183-1912, 1931-2106, 2371, 2374, 2377, 2385, 2387, 2389, 2391, 2393, 2395, 2397, 2399, 2401, 2403, 2405, 2407, 2409, 2411, 2413, 2415, 2417, 2419, and 2421.

[0086] In one embodiment useful for high-throughput assays, the oligonucleotide probe kits of the present invention comprise multiple probes in an array format, wherein each probe is immobilized in a predefined, spatially addressable location on the surface of a solid substrate. Array formats which may be usefully employed in the present invention are disclosed, for example, in U.S. Pat. Nos. 5,412,087, 5,545,531, and PCT Publication No. WO 95/00530, the disclosures of which are hereby incorporated by reference.

[0087] The significance of high-throughput screening systems is apparent for applications such as plant breeding and quality control operations in which there is a need to identify large numbers of seed lots and plant seedlings, to examine samples or products for unwanted plant materials, to identify plants or samples or products containing plant material for quarantine purposes etc. or to ascertain the true origin of plants or samples or products containing plant material. Screening for the presence or absence of polynucleotides of the present invention used as identifiers for tagging plants is valuable for later detecting the amount of gene flow in plant breeding, introgression of genes via dispersed pollen, etc.

[0088] In this manner, oligonucleotide probe kits of the present invention may be employed to examine the presence/absence (or relative amounts in case of mixtures) of polynucleotides of the present invention in different samples or products containing different materials rapidly and in a cost-effective manner. Examples of plant species that may be examined using the present invention include forestry species, such as pine and eucalyptus species, other tree species, agricultural plants including crop and forage plants, and horticultural plants.

[0089] Another aspect of the present invention involves collections of polynucleotides of the present invention. A collection of polynucleotides of the present invention, particularly the polynucleotides identified as SEQ ID NOS: 1-591, 1183-1912, 1931-2106, 2371, 2374, 2377, 2385, 2387, 2389, 2391, 2393, 2395, 2397, 2399, 2401, 2403, 2405, 2407, 2409, 2411, 2413, 2415, 2417, 2419, and 2421, and variants and x-mers thereof, may be recorded and/or stored on a storage medium and subsequently accessed for purposes of analysis, comparison, etc. Suitable storage media include magnetic media such as magnetic diskettes, magnetic tapes, CD-ROM storage media, optical storage media, and the like. Suitable storage media and methods for recording and storing information, as well as accessing information such as polynucleotide sequences recorded on such media, are well known in the art. The polynucleotide information stored on the storage medium is preferably computer-readable and may be used for analysis and comparison of the polynucleotide information.

[0090] Another aspect of the present invention thus involves storage medium on which are recorded a collection of the polynucleotides of the present invention, particularly a collection of the polynucleotides identified as SEQ ID NOS: 1-591, 1183-1912, 1931-2106, 2371, 2374, 2377, 2385, 2387, 2389, 2391, 2393, 2395, 2397, 2399, 2401, 2403, 2405, 2407, 2409, 2411, 2413, 2415, 2417, 2419, and 2421, and variants thereof, as well as x-mers of the polynucleotides of SEQ ID NOS: 1-591, 1183-1912, 1931-2106, 2371, 2374, 2377, 2385, 2387, 2389, 2391, 2393, 2395, 2397, 2399, 2401, 2403, 2405, 2407, 2409, 2411, 2413, 2415, 2417, 2419, and 2421, and extended sequences, probes and primers comprising or corresponding to a polynucleotide of SEQ ID NOS: 1-591, 1183-1912, 1931-2106, 2371, 2374, 2377, 2385, 2387, 2389, 2391, 2393, 2395, 2397, 2399, 2401, 2403, 2405, 2407, 2409, 2411, 2413, 2415, 2417, 2419, and 2421. According to one embodiment, the storage medium includes a collection of at least 20, preferably at least 50, more preferably at least 100, and most preferably at least 200 of the polynucleotides of the present invention, preferably the polynucleotides identified as SEQ ID NOS: 1-591, 1183-1912, 1931-2106, 2371, 2374, 2377, 2385, 2387, 2389, 2391, 2393, 2395, 2397, 2399, 2401, 2403, 2405, 2407, 2409, 2411, 2413, 2415, 2417, 2419, and 2421, or variants of such polynucleotides.

[0091] The following examples are offered by way of illustration and not by way of limitation.

### Example 1

### Isolation and Characterization of cDNA Clones from Eucalyptus grandis

[0092] Nine Eucalyptus grandis cDNA expression libraries (prepared from either mature shoot buds, early wood phloem, floral tissue, leaf tissue (two independent libraries), feeder roots, structural roots, xylem or early wood xylem) were constructed and screened as follows.

[0093] Total RNA was extracted from the plant tissue using the protocol of Chang et al. (Plant Molecular Biology Reporter 11:113-116, 1993). mRNA was isolated from the total RNA preparation using either a Poly(A) Quik mRNA Isolation Kit (Stratagene, La Jolla, Calif.) or Dynal Beads Oligo (dT)₂₅ (Dynal, Skogen, Norway). A cDNA expression library was constructed from the purified mRNA by reverse transcriptase synthesis followed by insertion of the resulting cDNA clones in Lambda ZAP using a ZAP Express cDNA Synthesis Kit (Stratagene), according to the manufacturer's protocol. The resulting cDNAs were packaged using a Gigapack II Packaging Extract (Stratagene) using an aliquot (1-5 μl) from the 5 μl ligation reaction dependent upon the library. Mass excision of the library was done using XL1-Blue MRF′ cells and XLOLR cells (Stratagene) with ExAssist helper phage (Stratagene). The excised phagemids were diluted with NZY broth (Gibco BRL, Gaithersburg, Md.) and plated out onto LB-kanamycin agar plates containing X-gal and isopropylthio-beta-galactoside (IPTG).

[0094] Of the colonies plated and picked for DNA miniprep, 99% contained an insert suitable for sequencing. Positive colonies were cultured in NZY broth with kanamycin and cDNA was purified by means of alkaline lysis and polyethylene glycol (PEG) precipitation. Agarose gel at 1% was used to screen sequencing templates for chromosomal contamination. Dye primer sequences were prepared using a Turbo Catalyst 800 machine (Perkin Elmer/Applied Biosystems Division, Foster City, Calif.) according to the manufacturer's protocol.

[0095] DNA sequence for positive clones was obtained using a Perkin Elmer/Applied Biosystems Division Prism 377 sequencer. cDNA clones were sequenced first from the 5′ end and, in some cases, also from the 3′ end. For some clones, internal sequence was obtained using either Exonuclease III deletion analysis, yielding a library of differentially sized subclones in pBK-CMV, or by direct sequencing using gene-specific primers designed to identified regions of the gene of interest.

[0096] The determined cDNA sequences were compared to known sequences in the EMBL database (up to mid-July 1999) using the computer algorithms FASTA and/or BLASTN. Multiple alignments of redundant sequences were used to build up reliable consensus sequences. The determined cDNA sequences are provided in SEQ ID NOS: 1-331, 1183-1536, 1896-1901, 1905, 1906, 1908-1910, 1932-1968, 2001-2036, 2074-2079 and 2104. Based on similarity to known sequences from other plant species, the isolated DNA sequences were identified as encoding transcription factors, as detailed in Table 1 above. The predicted amino acid sequences corresponding to the DNA sequences of SEQ ID NOS: 1-331, 1896-1901, 1905, 1906, 1908, 1909, 1910, 1932-1968, 2001-2036, 2074-2079 and 2104 are provided in SEQ ID NOS: 592-922, 1914-1919, 1923, 1924, 1926-1928, 2108-2142, 2175-2210, 2247-2252 and 2276, respectively.

### Example 2

### Isolation and Characterization of cDNA Clones from Pinus radiata

[0097] Fourteen Pinus radiata cDNA expression libraries (prepared from either shoot bud tissue, suspension cultured cells, early wood phloem (two independent libraries), fascicle meristem tissue, male strobilus, root (unknown lineage), feeder roots, structural roots, female strobilus, cone primordia, female receptive cones and xylem (two independent libraries)) were constructed and screened as described above in Example 1.

[0098] DNA sequence for positive clones was obtained using forward and reverse primers on a Perkin Elmer/Applied Biosystems Division Prism 377 sequencer and the determined sequences were compared to known sequences in the database as described above.

[0099] Based on similarity to known sequences from other plant species, the isolated DNA sequences (SEQ ID NOS: 332-591, 1537-1894, 1895, 1902-1904, 1907, 1911, 1912, 1931, 1969-2000, 2037-2073, 2080-2103, 2105 and 2106) were identified as encoding transcription factors as detailed above in Table 1. The predicted amino acid sequences corresponding to the DNA sequences of SEQ ID NOS: 332-591, 1895, 1902-1904, 1907, 1911, 1912, 1931, 1969-2000, 2037-2073, 2080-2103, 2105 and 2106 are provided in SEQ ID NOS: 923-1182, 1913, 1920-1922, 1925, 1929-1930, 2107, 2143-2174, 2211-2246, 2253-2275, 2277 and 2278, respectively.

### Example 3

### Use of a Myb Transcription Factor Gene to Modify Gene Expression in Plants

[0100] Transformation of tobacco plants with a Eucalyptus grandis Myb transcription factor gene is performed as follows. Genetic constructs comprising sense and anti-sense constructs containing a DNA sequence including the coding region of the Myb transcription factor of SEQ ID NO: 2076 are constructed and inserted into Agrobacterium tumefaciens by direct transformation using published methods (see An G, Ebert P R, Mitra A, Ha SB, “Binary vectors,” in Gelvin SB and Schilperoort R A, eds., Plant Molecular Biology Manual, Kluwer Academic Publishers Dordrecht, 1988). The constructs of sense DNAs are made by direct cloning from PBK-CMV plasmid by cloning cDNA insert into pART7 plasmid, which is then cut by NotI enzyme and 35S-Insert-OCS 3′UTR put into pART27 plant expression vector (see Gleave, Plant Molecular Biology 20:1203-1207, 1992). The presence and integrity of the transgenic constructs are verified by restriction digestion and DNA sequencing.

[0101] Tobacco (Nicotiana tabacum cv. Samsun) leaf sections are transformed with the sense and anti-sense constructs using the method of Horsch et al. (Science 227:1229-1231, 1985). Arabidopsis thaliana (ecotype: Columbia) whole plants are transformed with the sense and anti-sense constructs using either the vacuum infiltration (Bechtold et al., C.R. Acad. 316:1194-1199, 1992), or floral dip (Clough and Bent, The Plant Journal 16:735-743, 1998) procedures. Transformed plants containing the appropriate construct are verified using Southern blot experiments. Expression of the Eucalyptus Myb transcription factor gene in transformed plants is confirmed by isolating total RNA from each independent transformed plant line created with the Myb transcription factor gene sense and anti-sense constructs. The RNA samples are analyzed in Northern blot experiments to determine the level of expression of the transgene in each transformed line. The expression level of the Myb transcription factor, encoded by the Eucalyptus Myb transcription factor gene and by the endogenous Myb transcription factor gene, for each transformed plant line created with the sense and anti-sense constructs is compared to that of wild-type control plants.

[0102] To circumvent potential lethal phenotypes commonly observed with the ectopic constitutive expression of transcription factors in planta, constructs expressing the 5′ terminal DNA binding domains of MYB transcription factors (MYB TF) can be generated, under the control of either a constitutive or cell-specific promoter. It is hypothesized that ectopic expression of the truncated MYB TF creates an in planta competitive scenario for the endogenous MYB TFs and transgene product. Binding of this DNA binding domain product, with no associated activation domain, inhibits, or severely reduces, both the ability of the endogenous TF to bind to the appropriate cis-element and inhibits transcriptional activation of the downstream gene, resulting in a knock-out like phenotypic effect.

[0103] The Eucalyptus grandis transcription factor given in SEQ ID NO: 2076 shares amino acid sequence identity with MYB transcription factor genes from other plant species. This gene was identified from a cDNA library derived from Eucalyptus grandis floral buds. Analysis of the amino acid sequence using publicly available tools such as PROSITE and InterPro, readily identified putative DNA binding domains present in SEQ ID NO: 2076 (see Jin and Martin, Plant Mol. Biol. 41:577-885, 1999). The amino acid sequences of the identified DNA binding domains are given in SEQ ID NO: 2346 and 2347.

[0104] The adjacent putative DNA binding domains were amplified as a single fragment by polymerase chain reaction (PCR) (Forward primer 5′ CGTCTGTCTAGAAACAAGCTGAACATGGACAAGAAGC 3′ (SEQ ID NO: 2369) and Reverse primer 5′ TGGCCTTCTAGACTAGCTCTGACCAGAGAAA 3′ (SEQ ID NO: 2370)) with the aim of adding XbaI restriction sites on both the 5′ and 3′ termini to facilitate cloning using conventional restriction enzyme-based protocols, and a termination codon (TAG) to the 3′ terminus only. These primers amplified nucleotides 21 to 424 of SEQ ID NO: 2076. The resulting DNA binding domains fragment was cloned into the pART7/pART27 plant binary vector system (Gleave, Plant Mol. Biol. 20:1203-1207, 1992) for expression in planta under the 35S constitutive promoter.

[0105] The binary vectors were introduced into Arabidopsis thaliana by Agrobacterium tumefaciens-mediated transformation using standard floral dip procedures, as described for Arabidopsis thaliana (Clough and Bent, Plant J. 16: 735-743, 1998).

[0106] Phenotypic analysis of the resulting T2 plant translines (Table 1 below) showed that down-regulation of MYB TF activity in planta, associated with the over-expression of the DNA binding domains (sense orientation), resulted in a dwarfed phenotype (approximately 40% decrease in height compared to wild type (WT) or pART27 empty vector control), with spindly inflorescence bolts. Floral development and maturation were unaffected at the temporal level. However, evidence of floral aberrations was observed in lines displaying severe growth retardation. Gross phenotypic analysis of the other translines yielded no significant phenotypes compared to wild type or pART27 empty vector control, indicating that this observed phenotype is due to the sense expression of the DNA binding domains as hypothesized. The T2 observations were made from 15 plants from 5 independent transformation lines per construct.

TABLE 3
Phenotypic analysis of 35S::E. grandis MYB TF DNA binding domain or entire ORF

| | | | | Plant | Histological | |
|---|---|---|---|---|---|---|
| Construct | Description | Line | Plant | Phenotype | Phenotype | PCR data |
| MW2 | DNA Binding | 2 | 2 | Dwarf with | Decreased | Sense orientation of |
| | Domain (Sense) | | | spindly | number of | DNA Binding |
| | | | | inflorescence | lignified cells | Domains verified |
| | | | | bolt. | associated | |
| | | | | | with cellular | |
| | | | | | collapse | |
| MW2 | DNA Binding | 2 | 3 | Dwarf with | Collapsed | Sense orientation of |
| | Domain (Sense) | | | spindly | lignified cells | DNA Binding |
| | | | | inflorescence | | Domains verified |
| | | | | bolt. | | |
| MW2 | DNA Binding | 2 | 4 | Dwarf with | Not tested | Sense orientation of |
| | Domain (Sense) | | | spindly | | DNA Binding |
| | | | | inflorescence | | Domains verified |
| | | | | bolt. | | |
| MW2 | DNA Binding | 2 | 9 | Dwarf with | Decreased | Sense orientation of |
| | Domain (Sense) | | | spindly | number of | DNA Binding |
| | | | | inflorescence | lignified cells | Domains verified |
| | | | | bolt. | associated | |
| | | | | | with cellular | |
| | | | | | collapse | |
| MW2 | DNA Binding | 2 | 11 | Dwarf with | Not tested | Sense orientation of |
| | Domain (Sense) | | | spindly | | DNA Binding |
| | | | | inflorescence | | Domains not |
| | | | | bolt. | | verified |
| MW7 | DNA Binding | 1 | 7 | Normal WT | No vascular | Antisense |
| | Domain | | | | perturbation | orientation of DNA |
| | (Antisense) | | | | | Binding Domains |
| | | | | | | verified |
| MW7 | DNA Binding | 1 | 8 | Normal WT | Putative | Antisense |
| | Domain | | | | ectopic | orientation of DNA |
| | (Antisense) | | | | lignification | Binding Domains |
| | | | | | | verified |
| MW7 | DNA Binding | 1 | 13 | Normal WT | Not tested | Antisense |
| | Domain | | | | | orientation of DNA |
| | (Antisense) | | | | | Binding Domains |
| | | | | | | verified |
| MW7 | DNA Binding | 1 | 14 | Normal WT | Putative | Antisense |
| | Domain | | | | ectopic | orientation of DNA |
| | (Antisense) | | | | lignification | Binding Domains |
| | | | | | | verified |
| pART27 | Empty Vector | na | 1 | Normal WT | No vascular | Kan DNA verified |
| | control | | | | perturbation | |
| pART27 | Empty Vector | na | 3 | Normal WT | No vascular | Kan DNA verified |
| | control | | | | perturbation | |
| pART27 | Empty Vector | na | 5 | Normal WT | No vascular | Kan DNA verified |
| | control | | | | perturbation | |
| pART27 | Empty Vector | na | 10 | Normal WT | No vascular | Kan DNA verified |
| | control | | | | perturbation | |

[0107] Histological analysis of tissue from plants transformed with the 35S::MYB DNA binding domains (sense orientation) constructs stained with Phloroglucinol and Maules showed aberrations in the morphology and lignification of the vascular structures, with obvious xylem cell collapse when compared with the controls that were transformed with empty vector. Inflorescence bolt sections from plants transformed with the DNA binding domain of SEQ ID NO: 2076 were determined to have reduced cell population in the vascular bundle and an overall reduced gross size of the vascular bundle per se.

[0108] The histological data showed that introduction of the binding domains of SEQ ID NO: 2076 (in sense orientation) resulted in the pertubation of vascular structure development. Further analysis of the T3 generation of the MW2 line 2 (15 individual progeny) indicated that the aberrant phenotype was stably inherited, with 11 of the 15 plants analyzed exhibiting a spindly phenotype.

[0109] These studies demonstrate that the sequence of SEQ ID NO: 2076 encodes a transcription factor and that the introduction into a plant of genetic constructs containing the binding domains of SEQ ID NO: 2076 in a sense orientation may be successfully employed to modify the phenotype of the plant.

### Example 4

### Expression of a SHAQKY MYB Transcription Factor in Transgenic Cottonwood to Alter Wood Quality

[0110] The eucalyptus-derived cDNA corresponding to SEQ ID NO: 1953 was analyzed to obtain the complete DNA sequence, SEQ ID NO: 2371. This cDNA encodes the full-length protein sequence, SEQ ID NO: 2372, which is a divergent member of the MYB family of transcription factors. Instead of the more usual R2R3 repeat in the MYB domain, this protein comprises a single MYB repeat, which includes a variant of the SHAQKY motif (Mercy et al., J. Exp. Bot. 54: 1117-1119, 2003). The cDNA was cloned into an expression cassette in a binary transformation vector using standard methods such as restriction digestion and ligation. The promoter used in the expression cassette was a 4CL promoter from Pinus taeda, which has been demonstrated to exhibit xylem-preferred expression (U.S. Pat. No. 6,252,135). A map of the resulting plasmid, pWVK249, is shown in FIG. 1. The full DNA sequence of pWVK249 is SEQ ID NO: 2373 and the cDNA corresponds to the region between positions 8537 and 9774 of the plasmid. The T-DNA region of the plasmid (between the left and right borders) also comprises an NPTII cassette for kanamycin selection of transformed plants.

[0111] The plasmid was transferred into Agrobacterium strain GV2260, which was then used to transform eastern cottonwood (Populus deltoides), similarly to Che et al. (Plant Biotech. J. 1: 311-319. (2003)). After generation of shoots, development of roots, transfer to soil and hardening off, the transformed cottonwood plants were put in a field test where they grew for three years. Control trees, transformed with a reporter gene, were included in the test. After harvest, the wood from the trees was characterized for density or, more strictly, basic gravity.

[0112] Basic gravity determination was performed on small chunks of wood approximately 10 to 25 cm3 in volume. Basic gravity was calculated as (weight of wood when completely dry)∓(weight of water displaced by wood when saturated). It was found that half of the pWVK249 lines had basic gravity greater than any of the control samples. The results are shown in FIG. 2. The average of the pWVK249 set is approximately 4% greater than the control mean, and the best lines are 10% greater in density than the control mean.

[0113] Similar results can be found for other members of the genus Populus (aspens and cottonwoods), members of the genus Eucalyptus, and other hardwood trees. The increase of wood density may also be achieved in pine and other conifers using the present methods. The vascular-preferred promoter used here can be substituted by other known vascular-preferred promoters. Examples of vascular-preferred promoters are P. radiata cellulose synthase and E. grandis arabinogalactan protein, which can be found in U.S. Pat. No. 7,442,786.

### Example 5

### Expression of a SHAQKY MYB Transcription Factor in Transgenic Pine to Alter Wood Quality

[0114] The construct provided in SEQ ID: 2373 is transformed into embryogenic callus culture of loblolly pine (Pinus taeda) as described by Connett-Porceddu et al. (U.S. Pat. No. 7,157,620, issued Jan. 2, 2007). Embryos are germinated and rooted in soil. When plantlets are approximately 6 inches in height, they are transferred outdoors to acclimate to unprotected conditions, and two to three months later they are planted in a field test at approximately 10-ft×8-ft spacing. After at least two years of growth, plants are harvested, the wood is collected and measurement of basic gravity is performed to determine the amount of increase.

### Example 6

### Overexpression of Pine Transcription Factors in Transgenic Trees

[0115] Pine-derived cDNAs corresponding to SEQ ID NOs 341, 377, 388, 396, 413, 434, 454, 458, 462, 497, 504, 573, 1551, 1675, and 1910 were analyzed to obtain DNA sequences equivalent to full-length or near-full-length transcripts. The cDNAs were selected by searching for partially sequenced cDNAs (expressed sequence tags or ESTs) that overlapped the sequence of the original clone. By examining each set (or cluster or contig) of overlapping ESTs, it was possible to identify the cDNAs starting nearest to the 5′-end of the transcripts.

[0116] In order to demonstrate the effect of overexpression of these genes on the growth and development of trees, the full-length cDNAs were cloned into binary transformation vectors. A variety of base vectors was used in the construction of the overexpression cassettes. Vector pOX1 (SEQ ID NO: 2423) used a vascular-preferred pine 4CL promoter to drive the inserted sequence. Vector pOX28 (SEQ ID NO: 2424) used a constitutive pine polyubiquitin promoter to drive the inserted sequence. pAGSM49 (SEQ ID NO: 2425) was derived from pOX28 by addition of a cassette to prevent pollen formation. pAGSM50 was very similar to pAGSM49, differing only in the multiple cloning region. In pOX28 and pAGSM49, the multiple cloning region sequence was 5′-TTTCATTCAACCCGGGCTGCAGAACAATTGGCTAGCAAAGTA-CTTAAAGCTT-3′(SEQ ID NO: 2431) and in pAGSM50 the cloning region sequence was 5′-TTTCATTCAACCCGGGCTGCAGAAAGGCCTTTATCGATGGGCTAGCAAAAGTACT TAAAGCTT-3′(SEQ ID NO: 2432). All plasmids comprised an NPTII cassette in the T-DNA region for kanamycin selection of transformed plants.

[0117] SEQ ID NO: 2385 was cloned into three base vectors different from those provided above, yielding SEQ ID NOs: 2426, 2427 and 2428.

[0118] SEQ ID NO: 2387 was cloned into pOX28 (SEQ ID NO: 2424) and pAGSM49 (SEQ ID NO: 2425).

[0119] SEQ ID NO: 2389 was cloned into pAGSM50.

[0120] SEQ ID NO: 2391 was cloned into pOX28 (SEQ ID NO: 2424) and pAGSM49 (SEQ ID NO: 2425).

[0121] SEQ ID NO: 2393 was cloned into pAGSM50.

[0122] SEQ ID NO: 2395 was cloned into pOX1 (SEQ ID NO: 2423).

[0123] SEQ ID NO: 2401 was cloned into pOX28 (SEQ ID NO: 2424) and pAGSM49 (SEQ ID NO: 2425).

[0124] SEQ ID NO: 2403 was cloned into pOX1 (SEQ ID NO: 2423) and pOX28 (SEQ ID NO: 2424).

[0125] SEQ ID NO: 2409 was cloned into pOX1 (SEQ ID NO: 2423) and pOX28 (SEQ ID NO: 2424).

[0126] SEQ ID NO: 2411 was cloned into pOX1 (SEQ ID NO: 2423).

[0127] Table 4 below shows the correspondences between the partial and full-length sequences and the predicted translation products of the full-length sequences.

TABLE 4

| | | | | Plasmid |
|---|---|---|---|---|
| Original | | Full-length | Protein | SEQ ID |
| SEQ ID NO | Gene Family | SEQ ID NO | SEQ ID NO | NO(s) |
| 24 | LIM | 2382 | 2383 | 2384 |
| 1953 | MYB | 2371 | 2372 | 2373 |
| 1986 | MYB | 2374 | 2375 | 2376 |
| 2072 | MYB | 2377 | 2378 | 2379, 2380 |
| 2088 | MYB | same | 2261 | 2381 |
| 158 | AP2/EREBP | same | 749 | |
| 341 | Synaptobrevin | 2385 | 2386 | 2426, 2427, |
| | | | | 2428 |
| 377 | HOMEObox | 2387 | 2388 | |
| 388 | HOMEObox | 2389 | 2390 | |
| 396 | HOMEObox | 2391 | 2392 | |
| 413 | HOMEObox | 2393 | 2394 | |
| 434 | AP2/EREBP | 2395 | 2396 | |
| 454 | AP2/EREBP | 2397 | 2398 | |
| 458 | HSF | 2399 | 2400 | |
| 462 | CCAAT DR1 | 2401 | 2402 | |
| 497 | bZIP | 2403 | 2404 | |
| 504 | MYB | 2405 | 2406 | |
| 573 | Trihelix | 2407 | 2408 | |
| 1551 | C2C2 GATA | 2409 | 2410 | |
| 1675 | AP2/EREBP | 2411 | 2412 | |
| 1910 | SBP | 2413 | 2414 | |
| 1985 | MYB | 2415 | 2416 | 2430 |
| 2042 | bZIP | 2417 | 2418 | |
| 2046 | HOMEObox | 2419 | 2420 | |
| 2085 | MYB | 2421 | 2422 | |

### Example 7

### Reduction of Expression of Pine Transcription Factors in Transgenic Trees

[0128] For each of the full-length cDNAs, SEQ ID NOs: 2393, 2395, 2397, 2399, 2405, 2407, and 2421, a fragment of the cDNA was cloned into a transitive RNAi cassette in a binary transformation vector using standard methods such as PCR, restriction digestion and ligation. In transitive RNAi, an inverted repeat of a nontarget sequence is linked 3′ to a segment of the target gene, so that RNA-dependent RNA polymerase can extend into the target sequence and siRNAs with homology to the target sequence are generated (Filichkin et al., Plant Biotechnol. J. 5: 615-626, 2007). The sequence of the base transitive RNAi vector is provided as SEQ ID NO: 2429. Table 5 lists the full length SEQ ID NOs and provides the endpoints for the segment of each full-length sequence that was used in the constructs.

TABLE 5

| Original | Full-length | |
|---|---|---|
| SEQ ID NO | SEQ ID NO | Fragment ends |
| 413 | 2393 | 1195-1948 |
| 434 | 2395 | 684-992 |
| 454 | 2397 | 334-835 |
| 458 | 2399 | 2038-2326 |
| 504 | 2405 | 574-1568 |
| 573 | 2407 | 376-1265 |
| 1985 | 2415 | 1068-1360 |
| 2085 | 2421 | 687-1656 |

[0129] The fragments were amplified by PCR, with primers designed to add BamHI restriction site at the 5′-end and an SpeI restriction site at the 3′-end. The purified fragments were inserted between the BamHI and SpeI sites of the vector (positions 9297 to 9644 of SEQ ID NO: 2429). When the restriction enzyme digestion of the vector was performed prior to insertion of the target gene fragment, a short “stuffer” fragment comprising positions 9320-9642 was deleted. The promoter used to drive the transitive RNAi cassette was a 4CL promoter from Pinus taeda. The T-DNA region of the plasmid (between the left and right borders) also comprised an NPTII cassette for kanamycin selection of transformed plants.

[0130] The suppression construct targeting SEQ ID NO: 2415 was constructed to comprise an inverted repeat of the target gene driven by a strong constitutive promoter. The inverted repeat of the cDNA fragment included a short spacer of noncoding DNA between the two repeats. It would also be possible to use an intron as the spacer, for example the intron from the YABBY gene of Arabidopsis thaliana, which was used in SEQ ID NO: 2384. The sequence of the plasmid bearing the inverted repeat of the fragment of SEQ ID NO: 2415 is provided as SEQ ID NO: 2430.

[0131] Each of the suppression plasmids described was introduced into Agrobacterium via electroporation and was then transformed into embryogenic pine callus cultures as described by Connett-Porceddu et al. (U.S. Pat. No. 7,157,620, issued Jan. 2, 2007). Transgenic plants were produced, grown in soil either in a greenhouse or in field tests, and characterized for the presence of novel phenotypes.

[0132] The effect of a suppression plasmid on expression of the target gene is characterized by determining the amount of target gene RNA present. Methods such as RNA hybridization, microarrays, or quantitative reverse transcription PCR (qPCR or RT-PCR) are commonly used to measure RNA levels for a specific gene. The TaqMan assay from Applied Biosystems is a version of real-time PCR that allows the level of the target gene to be compared to an internal standard.

[0133] SEQ ID NOS: 1-2430 are set out in the attached Sequence Listing. The codes for nucleotide and amino acid sequences used in the attached Sequence Listing, including the symbols “n” and “Xaa”, conform to WIPO Standard ST.25 (1998), Appendix 2, Table 1.

[0134] Although the present invention has been described in some detail by way of illustration and example for purposes of clarity of understanding, changes and modifications can be carried out without departing from the scope of the invention which is intended to be limited only by the scope of the claims.

The application's sequence listing, which the Patent Office published only in electronic form, follows.

SEQUENCE LISTING (2432 sequences)

SEQ ID NO: 1 - DNA, 396 bp, Eucalyptus grandis
tctctctccgttcccctctctctctctctctctctctctctctagacaataagggggcattcaaagctctgtgctttccaccgaaaggactccagcagaaaggactcgtcgtcatgggcgagagagatgatctgggcttgagcttgagcctgagcttccctcagggtcacctgcatcagcagcagcagcagcagcagcagcagtccctgcagctgaacctcatgccctccttggtcccgtcctctgcttcgtctgctcaatctgggttcaatcttcagaagcgctcctgcaacgacgccttcccttcttcttcagatcggaactccgaggcgcgatcgttcctccgggggatcgacgtgaacagagagccgtcggcgggggcggcggcggactacg

SEQ ID NO: 2 - DNA, 725 bp, Eucalyptus grandis
ggacaaggcaaggttggtgcaggaaactggcttgcaattaaagcagataaacaactggtttatcaaccagaggaagagaaactggcacagtaacccgtccacctctactgtcctgaagagcaagcgcaaaaggtaattatattaagccagtgagtgaattaacttgattcttctagagcttctcaccaactaaaaattcaaaatgaagtaatgcaggtgaaaatagcagtgaccgcttcatgtagattaaggaaaattgtaaactaaactccttccgagtcgtgcatgtgctcatgatccagtggcacatatggttggtggcaaatgaagcgcgaatttcttttgattctgtagaggaagagcctaacatagatgagaaaaatctgcccactttctgctgctgtaaaggaaccacaaactaaattcggagggcagatccaaaacttatacccgcatcacgtggaagtcctggaataaagattgctgtctcgtaaattatgtgaaacgattctgctgcatcggctgatgggtgtaatttttgtttaccatattcatatatgtgaataagtacagagaagggttgtgggtgtatagtacaatagctctcgtttagttccatacacgtatagtagatagagattatagcatgttaggtgttgtcatttctactgtagtgtacgcttgtgaagcaaatgtagcttggtcttgattaacaaaaaaaaaaa

SEQ ID NO: 3 - DNA, 875 bp, Eucalyptus grandis
ctggagagccactttggatcaggagcgttgagaccggccgtgagatacttaactatgacgagtacgtgaaggagttcaaggtcgaagcccctagtgagggccggcccaagagatctatcgaagcctcgagagagactggggtcgtgttcgtcgacctcccccgcctcgtgcaaagtttcatggacgtgaatcaatggaaggaaatgtttccttgcatgatctcaaaggcagcaactgtggatgtggtttgcagcggtgaaggtcccaacagaaacggcgccgtgcaattgatgttcgcagagctgcaaatgctaacgccaatggtgcccacgagggaggtgtacttcatcagatactgcaagcagctcagcgcagagcagtgggccttagttgatgtctccatcgaaaaagtcgaagataacatcgacgcctctcttgtgaaatgcaggaaacgcccctccggctgcatcatcgaggataaatccaacggccattgtaaggtaatctgggtagaacacttggagtgccagaaaaccaccgttcatcccatgtaccgtaccatcgttaacagcggcctagcctttggcgcaagacactggatgacgacactgcaagtccagtgcgagcggctcgttttctttatggcgactaatgttccaaccaaagattcgaatggtgtcgccacacttgcaggaaggaagagcattttgaggctggcacagaggctgacacaaagcttttgtcaggccattggagcatcgagctatcacagctggaccaaggtcccaactaaaactggagaggacattagggtggcttctaggaaaaatctgaatgatcctggagagcctcttggggtgatcctatgcgcagtt

SEQ ID NO: 4 - DNA, 78 bp, Eucalyptus grandis
aatgcaggcggtgatgaccggctgtgactctagcaacatagccgctctgccatccggtttctcgatcctgcccgatgg

SEQ ID NO: 5 - DNA, 791 bp, Eucalyptus grandis
acaaaatggtccaagcatgcctccagtacagccttttgtccgagcagagatgctccctagtggctacttggtacgtccatgtgaaggtggtggttcaatcatacgcattgttgatcacttggatctagagccatggagtgtgcctgaagtactgcgaccattgtatgagtcctccacaatgcttgctcagaagacgacaatggcagctctgcgacagctgaggcagatagctcaggaagtttcacagcctaatgtttctggctggggaaggcgacctgcagcacttagagctcttagccagaggttaagcaggggatttaatgaggctcttaatggatttactgatgaaggatggtcgatcatggggaatgatggcattgatgatgtcactattctcgtgaattcatcccctgacaagctaatgggattgaatctttcgttttcaaatggattcccagctgtgagcaacgctgttctatgcgcgagggcctctatgctcttgcagaatgtgcctcctgcagtcctccttcgcttccttcgtgagcacaggtcagaatgggctgacaacagtattgatgcatactcagccgcagcagttaaagttggttcctgtgctttacctggatcacgtattgggagtttcgggggtcaggttatacttccacttgctcatactattgagcatgaagagttcttggaggtcatcaaattagaaggtatgggccactctccagaagatgccttaatgcctagagatatatttttcctgcaaatgtgcagtggagtggatg

SEQ ID NO: 6 - DNA, 403 bp, Eucalyptus grandis
gtgccctatcgattcgggccgctccttcgacacgagccttagtctcggtttaggctgttatggggatcctgaagatcacgagatcaagatcaagaaaccgctcgcgaagctcagtggtaactccacgtgcctcacgataggcttgcccggcggggaggcgtgcgggctgggatccgcgagtggggacgaggtcaggaacatcccgagcaggtcggcatcgtcgttctcaaactcaagcagtgcgaagagggagaaggcggagcaaggagaggaagaagcggttgagagagggacgggctcgccgagggcgactatcaatatcgaagatgaagatgagttcagccccaggaagaagctcaggctttctaaagcacaaagttccattttggaagagatgcttcaa

SEQ ID NO: 7 - DNA, 955 bp, Eucalyptus grandis
gaaaattcaatacgctaccttgcttcgaccgaagtcctctccctctctctctctctagacatattcaaatccgattctctctctagcctccccgtcgccgctgtcgtcgccggtcgccgtcgccgtcgcagagccgcggaggaggagagggagagagagagagagagcggagagacgccggtgcggggatggggcagcagtcgctgatctacagcttcgtggcgcgggggacggtgatcctggcggactacacggagttcaccggcaacttcaccagcgtcgccttccagtgcctccagaagctccccgccaccaacaacaagttcacctacagctgcgacggccacaccttcaacttcctcgtcgacgacggcttcacatactgtgtggtggccgttgaatctgtcggtcggcaagttccaattgctttccttgagcgagtcaaggatgattttacaaagagatatggcggtggaaaagctgcaactgcagttgccaaaagcctaaacaaggaatttgggtccaaattgaaggagcagatgcagtactgtgtggatcatccagaggagatcagcaagcttgctaaagtaaaagcccaggtttcagaagtaaaaggagttatgatggaaaatatcgagaaagttcttgatcgtggagagaaaattgagcttctggtcgacaaaactgagaacctccgatcccaggcacaagatttcaggcagcagggtactcagatcagaaggaagatgtggctgcagaacatgaagatcaagctgatcgtactcggcattttgatcgctttgattctcatcatcgtcttatccatttgtggcaatggcaaatgtaaataaattttggagctttggagagattgcattaatttcaagtcacacacactatggacgcgtgttctatatgacagtatttaattgctgtgtaaaaaaaaaaaaaaaaa

SEQ ID NO: 8 - DNA, 666 bp, Eucalyptus grandis
gaagagaaaaaagaggagcctccggctccaataacagtcgtgttgaaggttggaatgcattgcgaagcatgcactcgagttttgcggaaacgaatccggaaaattaaaggagtagagacagtggagaccgacgtggtgaatgaccgggtaatagtcaaaggtgtggtcgacccgccgaagctggtcgcatacgtgaaaaagagaacggggaagcaagcgtcgattgtgaaggaagaggagaagaaggaagaggagaagaaggaagaggcgaagaaggaggaaagcaaagaaggagagaagaaggacggcgaggaagggaaggacgaggacggctcgaagatggacataaagaagaacgagtactggccctccaggccttacatggaatatcaaatgtacccaacccagatcttcagcgatgagaacccgaacgcttgctccgtgatgtagtgtgatgtagtgctgagagtttccaacctcggccccagttaagagtacgtgtcgaggcaattttccattgtacttaaagattgctaataaacagattcgcgagaccgggagtcgttggctaattgtaatccgttgatgttctgtaatctgtgttaccaattgtctactctcttaatgtgaaagtgtagatgaattttcagtaaaaaaaaaaaaaaa

SEQ ID NO: 9 - DNA, 352 bp, Eucalyptus grandis
cctcgtccccaaggtttttttgcggcagtatggagttcccgagtgaattttcagaggcctcttcacagaagagaatcggggggagagggaaaatagagatcaaacggatcgagaacacgacgaaccggcaggtcaccttttgtaaacgccggaacgggttgttgaagaaggcttatgagctatcggtgttgtgcgatgctgaagtggcgcttattgtcttctcgagccgtggcaggctctatgaatatgctaacaacagtgtcagaggaacaattgagaggtacaagaaagcaagcagtgattcctcacatccacagtccgtttctgaagtgaacactcagttttatccagc

SEQ ID NO: 10 - DNA, 989 bp, Eucalyptus grandis
gaggagatggcgagggggaagatccagatcaagctgatagagaacacgacgaaccggcaggtgacctactcgaagcgacggaacgggctcttcaagaaggcgaacgagctcaccgtcctaggcgaccccaaggtctccatcatcatgatctccagcaccggcaagctccacgagtacatcagcccctccacctcaacgaagaagatgtacgatcagtatcagcaggcgctcgaggttgatctctggagctctcactatgagaagatgcaagagaacctgaggaagctgaaggaggtgaacaagaagcttcagctggaggtcaggaggaggttcggggaaggactgaatggtatgagcttatcggaattgtgcggtcttgagcaagatatggacaacgccgttagcctgatccgtgaacggaagtacaagacgctcggcaatcaaatcgacaccgccaggaagaagaaaaagaatgctgaggaaataaacaaaagtctcctgcaagactggaccaatctgatcaagcatctgagggaggacgacccgcacttcggaatggtcgacaacggcagggattacgaggctgtgatcgggtatacagacgccgccgccgccgctcgcttgtacaccctgcgcctgcaaccggaccagcccaatcttactagcggaggaggatcggagatcacgacctaccctttgctcgagtgagacgaaggcgtcggaaacccttccgacgtcctcatattgtctattcattctgtctaagggccgattccatctggaatcctgacttcattggtatgtcgaagtttaggactttgttatgtcatcctattcagcagctaagtttgttcttatcagaagctgttcctattatggaccgagggcgatttcctctagggcatcatgtgttttaagacaagtctatatataagactactttaaaacaatcgaatgagttggtgcaaaaaaaaaaaaaaaaaaaaaaa

SEQ ID NO: 11 - DNA, 526 bp, Eucalyptus grandis
agaaaatacagaaatctcagcacgatccccatctcctccttcgccaaagtcgttgggaacttccccccttctccctctcgctccgtccacgaagcaagcaagctctccgcgaagatcccttccttgttgttaccaaattggttgaagcttcttgtgggttgctggacctgcagattttggttaataaatgagtcagaagggccttatatatagctttgtggcgaaagggactgttgttctggccgagcacacgcaattttcgggaaactttagtactattgctgtgcagtgcttgcagaagctgccttctaatagcagcaagtacacatactcctgcgatgggcacacatttaacttcctaacggatagtggatttgttttcctggttgttgctgatgagtccgtcggaagaagtgtgcctttcgtgtttcttgagcgagtgaaggatgactttatgcagcattatagtgccagcattgcaagtggcgacccacatccacttgcagatgatgatgaggatgacgat

SEQ ID NO: 12 - DNA, 342 bp, Eucalyptus grandis
agagagtaatggggagagggagagtggagctgaagaggatagagaacaagatcaacaggcaggtgaccttctcaaagaggaggaatgggctgttgaagaaggcctatgagctctctgtgctgtgtgatgttgaggtcgcgctcctcatcttctccagccgtggcaagctctatgagtttggcagcgctggcccttctggcataaataagacgcttgaacgataccaacgtgacaacttcactcctcaagacaacgttgctgaacatgagacacaacagaactggtttcaagagatatcaaaattgaaggcaaaatatgaactcttcaacaaactccagaagc

SEQ ID NO: 13 - DNA, 197 bp, Eucalyptus grandis
gcctgcttcaaaaatcatctcaggaggaagacaaagcaaggctagtacaagacacgggcttgcaattgacacagattaataattggtttataaaccaacggaaaagaaattggcacagcaacccttcgtcttccacagttcccaagagcaaacgcaagagaagccatgcaggtgatccggataaagagagacctatg

SEQ ID NO: 14 - DNA, 182 bp, Eucalyptus grandis
tgtatagaaacaaaagcacgatttggaaaatcggttgaatctccggccacggacaagtggaaagtgtggttccagaataggagagccaggactaaattaaaacaaactgccgtagagtgcgagatgctgcagaaatgctgcgaaaccctaaaagaagcgcacagcaggttgcagaaggagtt

SEQ ID NO: 15 - DNA, 983 bp, Eucalyptus grandis
ggcttccctttcttatcctccattctcctctctccttctccttacactcacagacacaatcacagagagagagagagagagagagagagagagagagagagaatggcattcgcaggaacaacccagaagtgcatggcctgtgagaagacagtctatctggtggacaagctcacagctgacaatagaatctaccacaaggcctgcttcagatgccaccattgcaaagggactctcaagcttgggaactataattcatttgaaggagtcttgtactgccggccgcatttcgatcagctcttcaagagaactggcagcctcgaaaaaagctttgaaggaacccccaagattgcaaagccagagaaacccgtcgatggagagagacctgcagcgaccaaagcctccagtatgttcgggggaacgcgagacaaatgtgtaggctgtaagagcaccgtctacccgaccgaaaaggtgacggttaatgggactccataccacaagagctgcttcaaatgcacccacggggggtgcgtgatcagcccatccaactacgtcgcgcacgaggggaaactctactgcaggcaccaccacactcagctcataaaggagaagggcaatctcagccaactcgagggcgatcatgagagggaaacaatggctcctgaatcataaaacgctttgatcttgcactaccttgttcgttgagctgtcaccacactttgtggccagcggatttcaggctggtccaaaaacctgttatgctattagagaatctatgtccatctactaaatttgagatgtgtgagccttgaccggtttgatttggcttctgttttgcgattgcggatgatttctcgggttggttgtaagcgtagaataagtggtgcttgcttcttgactttgtgaaacctctgagcttgctttcttttcagtcttgtccagcgagtgtgtctagcatcatccctatttttcaaaaaaaaaaaaaa

SEQ ID NO: 16 - DNA, 397 bp, Eucalyptus grandis
catttggtaagatatttgaagagtcagtccgcaaagaattgtcccccgagtttgccaagttaatgcaagaggggtctgcctacttgccctctggaatttgcatgtcgacgatggggcgacatgtctcatatgaacaagcgatcgcgtggaaggtcctttctgcggaggagaacactgtccactgcctcgcttctctttcgtgaattggtctttcgtgtgagcatagcctaatatattctttttttgacgccctcttgctgctgttgaatagatgtgaaaaaactaagaggggttaggagttttgtcatactgaaaaagaaaagaaagaacacatccaattccccaattttttatttaatgaaaatttccatgtgatgtgcaaaaaaaaaaaaaaaaa

SEQ ID NO: 17 - DNA, 60 bp, Eucalyptus grandis
atgatggaaatattgagaaggttcttgatcgtggtgaaaaaatcgaacttctggttgata

SEQ ID NO: 18 - DNA, 60 bp, Eucalyptus grandis
agacagtcaatcttcgttctcaggctcaagacttcaggcagcagggacccaaaatgcgac

SEQ ID NO: 19 - DNA, 60 bp, Eucalyptus grandis
gaaaaatgtggctgcagaacatgaaaatagaagctgacttagttctgggcattattattg

SEQ ID NO: 20 - DNA, 48 bp, Eucalyptus grandis
ctttgattctggtcattgtttatctgttttgtcatggcttcaattgtg

SEQ ID NO: 21 - DNA, 766 bp, Eucalyptus grandis
tctgcagcatcattaaaagctagtccatttggctatcctggtatgaggcccacaagattcaccgggagtcaaatcatcatgccccttggtcacacaattgagcacgaagagatgcttgaagttatccgtcttgaaggccattctcttgctcaagaagatgcttttgtatcaagagatattcatcttttgcagatatgcagcgggatagacgagaatgcagttggagtctgttccgaacttatttttgcgccaattgatgaaatgtttcctgatgatgctccactgctaccctctggtttccgtatcataccactggattcaaaatcatctgatgtacaggattctctaacgacaaatcggacccttgatctgacatcgagtcttgaggtggggcctgcatcaacaaattgcgttggagatgttgcgccaagccatggtgcacgatctgttctgactatcgccttccagttcccatttgatgccaacacacaggataatgtggcagtcatggccaggcaatatgtccgtagcgttatttcgtctgtgcagcgggttgcgatggtcatatctccatcaggattgggcccttccattaaccccaagctttcacagggatctccagaagctctaacacttgctaactggatctgccagagctacaggcatgttctgataatttgattgaattggtcttcttttggtgcatctcactctgtgtttgttgtgatctgccactcatcaagctgatgctcgactatctctctcc

SEQ ID NO: 22 - DNA, 329 bp, Eucalyptus grandis
atacacaaggagatccacaagtctgggggaatagcacaagaggttgcagctgctgggccttcgtcttcttctggtggcatgaagagatcactggtcttctttttctgcgccaattgatgaaatgtttcctgatgatgctccactgctaccctctggtttccgtatcataccactggattcaaaatcatctgatgtacaggattctctaacgacaaatcggacccttgatctgacatcgagtcttgaggtggggcctgcatcaacaaattgcgttggagatgttgcgccaagccatggtgcacgatctgttctgactatcgccttccagt

SEQ ID NO: 23 - DNA, 954 bp, Eucalyptus grandis
attggaccttgcctcttctcttgagatcgggccagctggaaataggagttttaatgatattaatgctaattctggttgtacgagatcagtgatgactatcgcatttgagtttgcattcgaaagccacatgcaggaacatgtggcctctatggcccgccaatatgtgcgtagtataatatcctcggtgcagagagtggcattggcactctctccttccaatctcggttcacatgctggtctgcgtacacctcttggcactcctgaagcccaaacacttgctcgctggatttgccacagttataggtgctacttgggggtggatcttctcaagtccagcaatgaaggaagtgagttgattctcaagaacctgtggcatcactcagatgctattatgtgctgctctcttaaggccttacccgtattcacgtttgcaaatcaggcaggtctggacatgctcgaaaccaccttggtggcgctgcaagacataaccctggaaaagatttttgatgatcatggccgaaagactctgtgttcagagttcccacaaatcatgcaacagggttttgcttgtcttcaaggtgggatctgcctctcgagcatgggacgaccagtgtcatacgaaagggcagtggcgtggaaagttatgaatgaggaagagaatgcccactgcatctgctttatgttcatcaactggtcttttgtgtgatttctgttgcagaaactaaggtattaagctatgtaagttgtgaagaatgactcttcatctagtgactgctacttcaaactcctatggtctgtgaaccttagaactgatgtgtcctctcttgtttagacgttcgtcatgtggacgcctggtcgatgtcgactcttttgccatgtctgtgtagtggttatgaatggacgtggatgttatgcttggaagtggttgattatcattttcgtgctgtagatgtg

SEQ ID NO: 24 - DNA, 338 bp, Eucalyptus grandis
cagagagagagagagagagagagagagagagagagaatggcatttgcaggaacaacccagaagtgcatggcctgtgagaagacagtctatctggtggacaagctcacagctgacaatagaatctaccacaaggcctgcttcagatgccaccattgcaaagggactctcaagcttgggaactataattcatttgaaggagtcttgtactgccggccgcatttcgatcagctcttcaagagaactggcagcctcgaaaaaagctttgaagggaacccccaagatttgcaaagcccagagaaacccgtcgtggagagagaccttcagcgaccaaaggcttc

SEQ ID NO: 25 - DNA, 338 bp, Eucalyptus grandis
gcggcaaggagcaactaaatgtaacactctgattactagggacctctcattgtctttggatggcatttaaatcaccaggaggaatcacgtggctgaaacatttacttgtgaagaacttttacttaggggagcatctaaaatgcaggaatgggctcatcaagaaggcctacgagctctccgtcctctgcgacatcgacatcgccctcatcatgttctccccctccgaccgcgtgagccacttttcgggaaaaagaaggatcgaggatgtcttgacccgtttcattaacctcaccgaccaagaacgagacactcctagatgtccaggatcggcgcacacg

SEQ ID NO: 26 - DNA, 301 bp, Eucalyptus grandis
caaaccttcccagggtttccatttccatttccttcatagaatgctccgttcctttcttatccctttttgggtactctctgttctcatggtcctttcataaagttttctcatctcttaaccaagactggtaagagagagagagatagagagtttattagtgggtgagggtgttaaaaaatgggaagagggagggttcagctgaagaggatagagaacaaaattaacaggcaagtgaccttttccaagagaaggaatgggctcctcaagaaggcttatgagctctcgctcctctgtgatgctg

SEQ ID NO: 27 - DNA, 188 bp, Eucalyptus grandis
cgagatctccgtcctctgcgacgccgacgtcgccctcatcgtcttctccaccaagggcaagctcttcgagtacgccaccgactgttgcatggagaggatcctcgagcgttatgagagatattcatatgcagagagccaggttctcacaaacaatgccgaaaccaatgggaactggactttggaacatg

SEQ ID NO: 28 - DNA, 261 bp, Eucalyptus grandis
gtgattcctcacatccacagtccgtttctgaagtgaacactcagttttatcagcaagaagcatccaagcttcggagacagataagagaaatccaggtctcagataggcatcttctaggtgagggtataagtgatttgagcttcaaggatctcaagaatctcgagagcaaattagagaaatcgatcagccgtgttagatcaaagaagaatgagatgctttttgccgagattgagtacatgcagatgaggggccttgtgcagg

SEQ ID NO: 29 - DNA, 298 bp, Eucalyptus grandis
gagaactctcgcaatgagtgggatatactttcaaatgggggacaagttcaagaaatggcacacatagcaaatggtcgcgaccctggcaacagcgtctcgttactccgcgtaaataatgcaaattcgagccagagcaacatgcttatactgcaagaaagctgcacagactctgttggtgcttatgtgatctatgctccagttgacattgtcgctatgaatgtcgtattaaatggtggcgaccccgactatgtagcgctgttaccctcaggttttgccatacttcctgatgggccagagt

SEQ ID NO: 30 - DNA, 218 bp, Eucalyptus grandis
cgaccgagcaggtccatttcctcgagaagaacttcgagctggagaacaagctcgagccggagaggaagatccagctcgccaaggacctcggtttgcagccccggcaagtcgcgatatggttccagaaccgccgggcccgatggaagaccaagcacttggagaaggaatacgaagatctgcaagccagctataacagcctcaaggccgactgcgacggc

SEQ ID NO: 31 - DNA, 240 bp, Eucalyptus grandis
aaacaggcaggtgaccttcgctaagaggaggaatgggctgctcaagaaggcctatgagctctctgtcctctgcgatgctgaggtcgccctcattatcttctccacccgcggcaagctctatgagttctgcagcagccctagcatgctcaaaacgctcgaccgttaccaaaagtgcagctatggatccgttgaagttaacaaaccctccaaagaactagagaatgcctaccgggagtactt

SEQ ID NO: 32 - DNA, 1223 bp, Eucalyptus grandis
ggcccctctctctttctctctctctgtgtctgtctttcttgtggatccaccaggctcgtctttaagaatatacagcagcgagcaggcaagacaacgccccatctctcttctctctctctctctctctgtggctctgtctttcttttgtttcttgccgttttggggtgtgtgtgttgggttgtgtgaattggagcgaggatggggagggggagactgcagctgaagaggatagagaacaagatcaaccggcaagtcaccttctccaagaggagggcgggtctgctcaagaaggcccacgagatctccgtactctgcgacgccgaggtcgccctcatcatcttctccgccaagggcaagctcttcgagtactccaccgattcctgcatggagagaattctcgaacgctatgaaagatactcatattcggagcaccaagttcttgcaagtgagacagaatcgattggtagctggactttggagcatgctaagctcaaggccagacttgaagttttacacagaaattataggcatttcatgggagaagatcttgattctttgagtctcaaggacctccaaaatttggagcagcaactggagtctgctcttaaacacataagatcgagaaagaatcagctcatgcatgaatcaatctcagtgcttcagaaaaaggatagggcattgcaggagcaaaacaacctgcttacaaggaaagtaaaggagaaggagagggcactagcgcagcaagctcagtgggagcagcaagaccatgcccttgactcacctgttgttctaccccactacttgccatctctcgacatcaatggctcttatcaagcgagacacaacggacacgatgacggagagaacctgactcagcctcgggctggtacacttcttcctccgtggatgctccaccgtctcaattaaggcttcgacataaagggaaacttctgctgctatatctttgatatgcaattctgaagtccagctgatgaattgcatggcataatctggggctctcccccacccttgttctagcgaaataaacatacctctgctttttgctgcattcagtactcctaagtgtggtcctccgtgtatgtatagcaccattgcaaatatgcataccaatgtacatgtatgcaaaattatatatggaagttaacacaaccataaagcagatggagaagtatattgtttgctagcaaaaaaaaaaaaaaaaa

SEQ ID NO: 33 - DNA, 2148 bp, Eucalyptus grandis
ccgatctctcccaatcccctcctctcactctcccccaaaaaccagtctctggttttcctctctcccctgcacacacacacattctctctcctccttcccaccattattacagaaacagcagactgcgtagtgttgaaaaacttgatccacaattgattgggtaatgatgatgatctagagggagagagagagagagagagagagagagagagagagagagagagagcataaattcagtgcaagcttttgattggtgattggtgacatctcttctgggttgggtttgggtttgtgggtttgggtttgggttggtcttttgcttgtgagagtattattctttcttcaccctctgtgcatgaattttcttgggccatgctcatgcattctcctcctctttcttcatcaccatcgtcatcgtctctggctttgatgggttggcgagggggggagctgagggagagggagaggagaggagagaggagcggctgtgcgttcgcgtgcagggctgcacgaggtgttctcgtttcgggcgcgggcgctctgcttccatggctgcttttaagtaagacgccaaaagaaaacctttttgctctctcgagtgtcatgaactcgcactgaaagtgcgcgccgaaccgagaagaagaagaagaagaagaagaagaagaaagagaaaccatccccttagaaaacgcgaaaaagagtaaatagtaaaaagagcaagcttgatcttacttgatctaaaacattaagatccttctctgttcgagagaagtcacagtcccgctttttccagacatgaagagacttggcagctcagattcgttgggtgctttgatgtccatctgcccaccttcagaggaattgcagcacagtccgagaaacggcaaccccatctaccacagcagggacctgcagtccatgctggagctgggcctcgacgaggaaggctgcgtggaggaccagtccgccggcggcggggggcacgtcggcggcgagaagaagcggcggctgagcatcgaccaggtcaaggccctggagaagaacttcgaggtggagaacaagctcgagccggagcggaaggtgaagctggcccaggagctggggctgcagccgcgccaggtggccgtgtggttccagaaccgccgcgcgcggtggaagacgaagcagctggagcgggactacggcgtgctcaagtccagctacgaggcgctcaagctcagctacgacgccctcaagcacgacaacgaggcccttcacaaggagataaaagagctgaaatcgaaactccgggaagaagacgacaaccccgagagcaatctctccgtcaaagaagaggtcatcatccccggccacgacgtgtcggacaagatccgggccgcagacgacggtgacgacgacaccaaacgctctcctccccctccgatcaccgccccgcctcgcgagctgagcttcaacaatggtgggctgaaggacgggtcgtccgacagtgactcgagtgcaattgtgaacgaagagaacgcggcgaccagcagcagcagcccgaaccccgccgtccagagccacggcggcttcttgaaattcatggggtcatcgtcctcttcggcctccccaccgccgccgccaccggcttccttcggcgggtgcttcagcttccagttccagcgagcgtaccagcctcagcctcagcctcctcaccaccaccaccaccacagtccgtacgtgaagatggaggagcacaatttcctcggcggcgaggaggactgcaacttcttctcccaacaacaagcccccaacccgcaatgggaacgcccccaacaagggaaacgaaggaaaacaaactccccccgtggaaggggactccagattagagatcgataaaaaaaatgtagggcgacaactccctagctttacgtgcttgtgaagtgaaacaaactctcgggcacacgattgcacgaatcacttcaacccggcacgacatgactcgacacgacgagaataagatcgagctagtgagagaagagtttgggcacggagcgacaattcgagtagtatgcagttccttattgcgcgcggcattccggttataggatgcaaattagaattgaatatgatgcgatatggtaatgttttaaaaaaaaaaaaaaaaaa

SEQ ID NO: 34 - DNA, 273 bp, Eucalyptus grandis
gtcttgcgctcggttcttgagctcgttcttgagagctgaacggagacgatgggcgaggaatcgttcatatacagcttcgtggcgagagggacgatgatcttggccgagtacacggagttcacgggcaacttcccggccatagccgctcagtgcctccagaaactcccttcctccaacaacaagttcacctactcctgcgatcaccacaccttcaatttcctcctcgaagatggctacgcttattgtgttgtcgccaaagaatcagtgggccaa

SEQ ID NO: 35 - DNA, 384 bp, Eucalyptus grandis
attccatttagcctctttcctcctcaatcggaagggttcttcaacccaatggacggcaacctctcattgcaaatcggatacaatccgacatgtctggacgagatgaatgcttcggtttcgagccaaaatgttgccggattcattccgggatggatgctttgaacttactacatcgacttggagtgtgaatcgagctggtgaaatttgtgcgcgtgtcccttgtaaaattgcgatccgcaagacaataagtacataatattttggagctgtgatgacataaaaagaggaaggccaccctttcctctctcatgatcagaacttttgataatgtctgtatggcccggcagtgcaattggaacgagctcagctttgcagttcttttcg

SEQ ID NO: 36 - DNA, 238 bp, Eucalyptus grandis
gcaggaggagagcccatgtggattgcaggacccgatggctcttcaagcgtgctgaatgaagacgagtacattcgcgcatttcctcgtgggatcgtaacaaaccccaccggatttaagcgcgaacctcacgacaaaccggggtcatcatcatgaatcacatcaatcttgttgagattctcatggatgtgaaccagtggtccactatattctcaagcatcgtgtcaagagctatgacttt

SEQ ID NO: 37 - DNA, 698 bp, Eucalyptus grandis
gccttggcacgcagattccatcgggaatccatatgccttctgcgaatcttagttccatatcgttcttgggtcctattcccatggtatcgggggatggtggtgggaggaccggttctgagcggtcaagaaacgctgattgtgctccggcaggttttcctggaggtgatgaagatgtgaataagggaggggacattccttatggaatgtcaaccatcgtgagagtcattcccaattctaggtacttgagggtggcgcagcaactgcttgatgaaatagtgaatgtgcgaaaggctttgaagcgctctgatgacgcgaatgaccaatctagacatgagaaccaaaggagccccaaagatgcggatgggggttccaagaacgaagcatcctcaaatccccaagaatccgccagtaactctagcgagctttctgctgctgaaaaacaagatttgcagaacaagctcacgaagctcttgtccatgttggacgaggttgataaaaggtacaagcagtactatcaccaaatgcagatcgtggtacagtcttttgatacaatagcaggaagcggtgcagccaagccctacacggcgcttgcgctccagaggatatcccgccacttccggtgcctgcatgacgcgatcacgggtcaaattcaagcaacccgtaaaagtctcggagagcaagacacctctacagaaacg

SEQ ID NO: 38 - DNA, 277 bp, Eucalyptus grandis
aattcttactgacactccatcaaactggtacaccgcgtcctgaacatttcacccagtggacctcaatgacttgatatcttagaatggatattggaacttataggggttacgtacagacgtcttgatggaagtacccaggtgacggacagacaaagcatagttgacactttcaataatgatacttccatatttgcttgcttgctttcgacgagagctggaggacagggtttgaatttgaccggagctgacacggttgtcatccatgacatgggatttc

SEQ ID NO: 39 - DNA, 225 bp, Eucalyptus grandis
tgttggcaccatgtacacacacagtgtggtaaagcaggctttgggatgctcaagcaagagaatctgagcaatgaactagatagggtcaaaaaggagaacgacaacttgcagattcagctcaggcacctgagaggaagacataacatcactgaaccacagagagctgataatcctagaagacactcttgaaaacggcctcggatgtgtccgagaccagaaggacga

SEQ ID NO: 40 - DNA, 341 bp, Eucalyptus grandis
aggcagcaaagagctcgagtccttggaaagacagctagatgggtcattgaagcagatcagatcacgaagaactcagtacatgttagatcagctgactgatcttcaacatcgggaacagttgctccacgaagcaaacaggaccttgaatcaacggttgatggaaggataccaagtgaatgcgctccagttaaatcaacatgccgaggaagtcggaggatacggtcatccaccgccgccgccactgccgccacagccacttgctcagcctcacagcgaagcttttttcatcccttggaatgtgaacccactttgcaaatgggataccagcccgatccagtgtc

SEQ ID NO: 41 - DNA, 1286 bp, Eucalyptus grandis
ccatcaagctttctttcacaaagagaggggctttcgggagacaagcttcgacggagaagagtctttaacttagcaccaatatagagagcgtcttcaagctcgggtatggtcgagggagaaagaaatggcgatgacgatggtgcctcacagggagagcagcagtggaagcatcaacaagcacttgaccgactcggcaagtacgtgaggtacacagcggagcaagtggaagctctcgagagggtctattcagaatgccctaagcccagctctctgcgcagacaacagctgattcgggagtgtcccattttgtccaacatcgagcctaagcagatcaaagtctggtttcagaatcgcaggtgtcgagagaagcagagaaaagaggcctcaagactccagacggtgaacaggaaactgacggccatgaacaagctcttgatggaggagaatgatcggctgcagaagcaggtttcgcaattggtatgcgaaaatggctacatgcgtcagcaactccatactacatcggctactactaccgatgcaagctgcgactctgtggttactactcctcagcactctctcagagatgcaaataaccctgctgggctcctctccattgcggaggagacattggcggagttcctctccaaggctacaggaactgctgtcgattgggttcaaatgcctgggatgaagcctggtccggattcggttggaatcttcgccatttcacaaagttgcagtggagtggccgctcgagcctgtggtcttgttagtttagaaccaaccaagattgtagagatcctcaaagatcgtacttcatggttccgggactgtcggagccttgaagtcttcaccatgtttcctgccggaaatggtggaacaatcgaacttgtttacacgcagatttatgctccaactactctggctcctgcacgagatttatggactctcagatataccacgactctagaaaatggcagtcttgtggtatgtgagagatctctgtccggatctggtgccggccccaacccagcttcagcagctcaatttgtgagagctgaaattcttcctagtggctatttgattcgcccatgcgagggtggaggatcaatcattcacattgttgaccacctcaatctcgaggcctggagtgttcctgaggttcttcggccactttatgaatcatccaaagttgtggcccagagaattactattgcggctcttcgatacatccggcaaattgctcaggagacgagtggggaggtggtttatggtttgggaaggca

SEQ ID NO: 42 - DNA, 338 bp, Eucalyptus grandis
ctctcttctttctctcttttctctcaagctctctccttcatcttcaagaacacaagaccaaatcaatctcccaccatctcctcaaatgggcatagatgatctgtgcaacacaggccttgttctgagtcttggcctcgagacgcccttcaagatcgaagcccagaggcaagccaaacagcgccttaacttcgagccctctcttacgctgtgcctctccggcacgaccaaagctacccgcgacgagcagcctccggcggaccacttgtatcgccaggcttcgccgcacagccacaacagcctcagcgcggtgtcgtcgttctcgagtccgcgggtgaaga

SEQ ID NO: 43 - DNA, 219 bp, Eucalyptus grandis
ggagagtggtgaagcacggcgacttagagattctctggtggaaatggcaaatgtaggcaagagccctagcatgttgacagagtgtggtcttgcagagaattctctcgtctcaattgcggaaagagtgacacatcatcggtggtcctggtcggaggtcaaatatctctctgattgccatctgatggcactagatgctagcctttagagttgtgtatcgga

SEQ ID NO: 44 - DNA, 310 bp, Eucalyptus grandis
tattctgaagcaagttcagatgagggaaatcagtattctacacgtgaagaggagggagagattgaggagtttgaggaggacacttacagtggtgctcctggagcactaccaatcaacaaagaccagtctgatgaggatgttccggctgaagaatgtgatgagtatccatggacatcagagaggactaggaacaatcatttgccggaagaagccggtttctcaggatcatcggcagacagtcctagaggaatcaggatggcatctccttctgcttcttcacagaaatttggatctttgtctgcattagatt

SEQ ID NO: 45 - DNA, 1043 bp, Eucalyptus grandis
tctctatctctgttctcgaacctctgcggcgaattccttctctctataactgaagagtatgaacgcgccataagcgtcgtcgtcttcgtcgtcatcgtcatcatcaacgggattcctcccatcgcccctcctcctctcccaccgcatggccttccacaaccacctctcccaccaggacctctcctccctccaccacttcgccgccgaccagcagccgccgccgccgcagcaccagcagcagcagcagcacctgccggactcctcctcctccgtccaccaccagctccaccacgccgccggccccaactggctcaacaccgccctcctccgctccgacgccgcggcggcggcggcggcggcggcgggcggcaacagcttcctcaacctgcacacctcgtccgactccgccgcgtcgccgcaggcgcagcagcagccgccggcgacgtccgcgtcggccgcggcggggcaccaccagtggctgtcgcggcagcactcgtcgctgctgcagcggaaccacagcgaggtcatcgacgcggactcgatcatcgactcggcggatttgaaggagagcgtgagcaagggggacggcgggggcggcggggccgcggagagtaattgggagaatgccaagtacaaggcggagatattggcgcacccgctgtacgagcagctgctgtcggctcacgtggcttgcctgaggattgccacgccggtcgaccagttgccgaggatcgacgctcagctggctcagtcgcagcatgtggtggccaagtactcggcgatgagtcaaggattggtcgctgatgataaagagcttgatcagttcatgacacattatgtcctcttgctttgctcttttaaagaacaactgcagcaacatgtccgtgtccatgccatggaagctgtaatggcatgctgggagattgagcaatccctgcaaagcttaacaggtgtttctcctggtgaaggtactggggcaacaatgtctgatgacgaagatgatcaagttgatagtgacgccaacttgtttgatggaagtttag

SEQ ID NO: 46 - DNA, 391 bp, Eucalyptus grandis
ccaacaagtcatatatcctcgacttgctcccagtggaacgccttccattacttaatcgctgctagcgctaaacccccctcactcttcaccagcaaaaacgccttttctcgcacacaaatgggtcgtcgtaaaattgaaatacagccaataacgcacgagcgaaaccgatctgtcacattcctcaagcgcaagaacgggctgttcaagaaagcgtatgagctcggtgtgctctgctctgtcgacgtcgctgttatcatctttgaggatcgcccagggcacagccccaagctctaccagtactcgtctcgcggtatccaggatattgtgcagaggcatcttcatcacgatggcgagactgataaccgtggccctggggacttttcgggcgctg

SEQ ID NO: 47 - DNA, 821 bp, Eucalyptus grandis
ctaccgtaccgcctcacttaaatatcatcgccgtttgtcttcttgctcaactgttccaaatcccaggatcacagcaaagattcccttcaccatagcacgagcctccggctcctgccgagccgtccaagccgaaatagccacgctagggaaccaggtccatgtaacgcttcgtaatcaattgaatgaaggaagcacagagggcgagccagcgagcgagtgaaggaatagcgcctcccgacacccgtatataacagcaattcaagaactgcgcttccccacaatcttcccagtacaagctctagacggtctcgactcaaaggcatggataaagtaagtgcttcgtgtaattagactcaaccaccttctctgattccccatatatacccaccagaacgtcaatcaagcagagcagcagcaccgttggcttttaagatgtttagtacgggagaatattctgctgctgccttcgaaggcatggactcgctcccgagcccaaggaagaagaagaaccagctggtgaacagaagaaggttcagtgatgaacagatcaggtcactggagtctatctttgaatccgagtcgaggctagagcctcggaagaagctgcagctcgctagggaattggggctgcagccccgccaggtggccatttggttccagaacaagagagcccgatggaagtccaagcagctggagcgtgacttcgccattcttcgcgccaactacaacgccctctattcccggttcgagtctctcaagaaagagaagcaatccttggtcactcagattgagaaactaaaccaactcgtcgagaagccgca

SEQ ID NO: 48 - DNA, 648 bp, Eucalyptus grandis
cagaagcatctcgtttcaggcaaagcatgaaggttcatcagttcgcacgtggattctttgagctcgaacccaccaccctcacgctcgggtgcaaacgcctccgccccctcgttccaaagctcccccaccagaccgacgtggtctcgactgccgcatttgtcgacatcaagagcttcatccgcccggagagcggcccgcggaggctcggctcctcctctgacgacaagagagaccctcctcaggtggaaacacatccaggagggacacgttggaacccgacacaagagcaaatcggaatactcgagatgctgtacagagggggaatgagaactcccaacgcgcagcagatcgagcagatcacggcacagctcagcaagtacgggaagattgaaggcaagaacgtgttctattggttccagaaccacaaagcccgcgagaggcagaagcagaagcgcaacagcctcggcctctctcactgctcgagaacccccaccacagccgccaccatcgccactgtaactttgaacactactaaggtacacagaaccatactaccatatttttttcctcattccggcattggtgtcagagcgctgcatgatgcatgctgacctcgacagttggttcgtcggactcatgcttcatgtg

SEQ ID NO: 49 - DNA, 559 bp, Eucalyptus grandis
tattccctctcaattttagcttctagcgttctttttcccccattttatcaaatataatcatcatcacgatcgccctcccttttcctctctctatttctctctctctctctctctctctttctctctctctctctcggagcttcagcaagactgtcaggctaaactgtggagtctcaaagattccaacaggaggagtgcgtgcataaggctcaggacatgacttgcaactagcgagggattggactgatggccttcttttcaccaaatttcatgcttcaaagcccgcacgatcaagatcatgaacaccctcatcaccagcatcagaccagatcctctcctcttgcacgcctcaggacttccatggtgttgcctccctattgggcaagagatccatgtccttcacgggcattgacgtgggcgacgaccccaacatcaacaacggcaacgttaatggggaggaagatctgtccgaagatgatgggtcgcagccagggggagagaagaagaggaggctcaacatggaacaggtgaagacattggagaagaactttgagcttgg

SEQ ID NO: 50 - DNA, 486 bp, Eucalyptus grandis
gggaaggcgaccgcttccggcggcggtggcgggtacatgagcagcccggtccctctcgggcctttcacgggctacgcgtcgatcctcaaggggtcgaggttcttgaggcccgcgcagcagctgctggaggagctttgcgaagctggccgcgcaatttgtaccgagaaaatgacggatgattcgtgcgcgatgacggagcctgccatggacagcttgagtggtggttgtgggattggtatggacgatggttgtggtggagacggcggcgagttccgccggaagaagtcgaggttaatctcgatgcttgacgaggtctgcaggaggtacaagcaatactgtcagcaaatgcaagctgttgtagcatcattcgaatgtgtggcggggcttagtaatgcagctccttacgcaaacttggctttaaaagctatgtccaaacattttaagtgcctgaaaaatgcaattgctgaccaacttcagttcaccaac

SEQ ID NO: 51 - DNA, 726 bp, Eucalyptus grandis
tttctctctctatctccatctctctctctctctctctcttggatcaagccgaaatctctctgctcaatccctctccgatccgatctccgccgccgccgccgccgccgtcgctggacctcgatctcctctcctctcctctcctctcctccgccgcggagctctccggcgatcccgcctcgcttcggctttagggttttcccctttcccccggggtggtcgcgatttcggcgaggcattgtttcggatttcgcggggggatccatgggtcaacagtcgctgatctacagcttcgtggcgcgggggacggtgatcctcgccgagtacacggagttcaccggcaatttcacctccatcgcctcccagtgcctccagaagctccccgccaccaacaacaagttcacctacaactgcgacggccacaccttcaactacctcgtcgagaacggattcacctattgcgtagttgcagctgaatctgctggcagacagattcccattgctttcttggaaagaatcaaggatgacttcaacaaaagatatggtggaggaaaagctacaacagctgctgccaacagcctgaacagagaatttggtcccaagttgaaggaacacatgcaatactgcgttgaccatcccgaagaaatcagcaagcttgcgaaagtgaaagctcaagtatctgaagttaaaggtgttatgatggaaaatattgaaaaggttcttgaccgg

SEQ ID NO: 52 - DNA, 395 bp, Eucalyptus grandis
tgagtggtggagtgtccacaataagtggccttacccaacggaagccgacaagattgcgctggccaaatccactggcctcgaccagaagcaaataaataattggttcatcaatcagaggaagcgtcattggaaaccctcagagatcacacattataaagtcatttagacattttgttaaccattcttgcatgagttcaattacagagcatgtagaatcacaatgccttcccccttttttgggggaattaaagagtcaccaaggatgcgatgtacacaaagaaacaacatgagcgcagcaggaagcgatcacctaatgtcgcagcaagcacgacatccagttcacctcaatcagccactaatattgcccggggatactgtccatgagagcgaattgc

SEQ ID NO: 53 - DNA, 1700 bp, Eucalyptus grandis
cgaaaagggcagaggttaatgctctgcaccaaccgccttactctttcttaaacctctcaagcctctcactcttctgagctcattacttcacttacaacacactctctctccctgtattagaaggaaaggatgagtaaacaagatgtcatgaagatgcagacgtgtgttctcagagtgaacatacactgtgaaggatgcaagcagaaggtcagaaaactgctgaagaagaccgagggagtgtactctgctaatatagatgcggagcaaggcaaggtaacagtgctcggtcccgtagatccgtacacgctcatcacgaagcttgagaaatcagggaaacatgcggagctctgggggggatcaggaggacacaagaacggcacccaaaaccctcctccttcgctcccacaacaaccaccgcagtcggtttcgctccgtcgacgaatctgcacggaggaggagacggcccatggcgatgcaaactgggatagggctttccaagatcctggtcctcgccggagctggatacactggcacgatactgtttcagaacgggaagttgtccgacttgttgggcgagctccagggtttggtgaagggattagaaaaatctggtagccaatcagatggagataaagactattctgatgctgttgccgcacaggtgcgtcgattggcaatggaggtccgacagctagcctctgcacgtcaaataactgtcctgaatggaaattctagccaaatgggcaacttaactaatatggttgttccagcagctacactgggggcactgggatatggctacatgtggtggaagggtctttcattctcagatctcatgtatgtaaccaagcgcggtatggccaattgtgtggcaaacttgacccaacatctagagcatgtctccgaggctctcaactcagtaaagaaacatctaactcagcgaattgagaacttggatggcaaaatggatgaccagagggagctatcgaaagaaataaagaatgaggtttcttctgtaaaagccaatcttgatggtctgggtgatgacctggattttttgcagagaatggtttccggtttggatgtacgaatgggatcactggagtacaagcaggattgggcgaatgagggtgtgaggtatctctgtggtgtggctagcgggcagaaggtggaaatgccaaaaatgctgcaggagcaaattaagatttcaggcacctctcgaggattactctcatatcaggatactccaagtcttaagggtctgaaggaaatcgctgatgcattgaccttgagtattgatagatcagcttcagatgctgttgtgcaagatggagttgaaagattaaatggaaaaccaaagccattgccaagggctagttcaaccacatgttgatcgtagagtaatgtgaagttcccctcgcactgtggtactaaaccatggatgtacatgtgcttgttacaccacctttcgattcctcaaggttggactttggtagcatcagtcctcattgcagatgtaacggtagatttggtatgtaaatggaattcacttccaaagtatgagagattgagagttattatggcgatgcagattggtgctgtcaaagtaataatccggtgaatctcatcccgaatatttgctgctcttttgtattatttttcaagttatggtgtgaaaacctctgaagcggtttgtttcc

SEQ ID NO: 54 - DNA, 944 bp, Eucalyptus grandis
ctcttcctccctcctctgcaatttgcacggagccctcccgctctcgcttctttaacatgcccaccacctcctggtgcaacttcacctcgaggcctccgtgagctactgtgtgggcgtgcttctcttctcgtaataattctaatcctaacatggtgtggtatgcgagacaaaaccagaccagaccctccatggctcgtctagtccctttcctatccgtttcgtgacccacctgggcatctccaattactctctctctctttctctctctctctagggttttcgaagacagctcctccccctcgaagctcgctagggttttggatcgtcgtctcatctcgggtcgtgtttggaatggaggaatatggccagatgaacgagaacagtagcactgggtccagagggaacaacagcttcttgtacgcatcgccggttcttgggccgagctcctccggcaatagcaattacgggaggggaaatagcagcggtggccacttctattcccagtccggcgatcactgcttccaatccgaagcgccgccgcacccggtggtgaagactgaagcaaccacctctcaccacggccatgctcagaagtttcatcactattctctggtgagagaccatcatgacccatcagcttctcaccaccaccaccaccaacaccaccagcatcagcagctacaaacagcgagcgagagctcgcgcgaggtcgatgccatgaaggccaagatcatcgctcaccctcagtattccaacctcttggaagcttacatggactgccaaaaggtcggagcgccgcctgaagtggtggcgaagctgtcggtggcgcgacaggagttcgagtcgcggcagcggtcgtcggtggcttcggcggacgggtcgaaggacccggagctggatcaattcatggaagcgtattacgacatgctggtgaagtaccgggg

SEQ ID NO: 55 - DNA, 915 bp, Eucalyptus grandis
gtgaagaaggtgaagatgaacaggtcttgcagcccaagatcaagcggaagcgtagtctcagggtgcgccctcgtcacactatggaaaggccagaggaaaagtctagcaatggggcactacctgtacaatgtggagattctgctttcttgccactccaaatggaccacaagtatcaaccccagtcaaggactgcgtctgagaccaatccctttggagaacctactgcttccaagcatggtcatggtggtccctccatgaaaagcaagcgacaaacatctctaaggagaataaatgatccatcaaagctacatcccttgccaaaatctagcagatcaaatcacatttcgtcatcagatgctgctgcggaacgctcgagagaaaactggaatggtagagttgcaaatccttcaggaaattcaagtgttggtgccggtttatctgaaatcattcagagaaagtgcaagaatgtagtgagcaagctccagaggaggatagataaggaagggcatcacattgttccgctgctaactgacctttggaagaggatgggaagtcctggtcatatgggtggtgttggaagtaaccttttggatttgcggaaaattgatcagcgcattgagaaattggagtacggcgatgtgatggatcttgtgcttgacgtgcaactgatgttaaaaggtgccatgcagttctatgggttttctcatgaggttagatctgaagcgagaaaagttcatgatctcttctttgacatattgaagattgcatttccggacacagattttgaagaagtgaggaatgctctctctttctcgggccctggtgctgcatcccaatctgctccatcaccaaaacaggcatccgctggccaaagcaagagacacagggcattaaatgaggtcgatgctgacaaag

SEQ ID NO: 56 - DNA, 498 bp, Eucalyptus grandis
gtggtggggaaggctctgcagaaatgcgccaaaatttctacggatttgaagaaggcgctctatggctcttccgtcgcttcatgcgagcactactccgaagtggaagcttcctctaatcggattgtcactcaggatgatgttgatgcagcatgtggtgctgatgatacagattttcagcctgttctgaagccttatcagcttgttggtgtcaactttcttcttttgttgcatcggaagggcgtaggaggagaggggcagggggtgctaaaatatgatacatctctagctaatggtgcatctttgtactccatgcaagccatcctagcggatgagatgggtcttgggaagaccattcaggccataacatacttaacattgctgaaacacttgaataatgatccgggtccgcacttggttgtatgcccggcttctctcttggagaattgggaaagggaactcaaaaggtggtgtccttcattttcagtactccaatatcat

SEQ ID NO: 57 - DNA, 474 bp, Eucalyptus grandis
ccaaaggtaagttcgatcaactgtagatcataggagtaatttaaaccatgttcatggttgacgaccacgctttatgtttgagttgcaattgtacattcaacattctggcgtgttgcaattgcagctatcccaaagattcggacaaacacatgctcgcaaaacaagcgggactaaccaggagccaggtgtctaactggttcatcaacgctcgggttcgcctctggaagcccatggtcgaagaaatgtacttggaagagaccaagagccgagagcaagctgggtctgagaacggcacgactcgcagggccgccaccaaatccaacaaggacgctgctggtttgaagtccgcatctcaagaagacaatgcctttggaatgaacagctccatcaaatccttccaatcaagccccaacaaggccctcaatcaagccgccatttcaccctccgagaactccaactcgacttcctcaactt

SEQ ID NO: 58 - DNA, 489 bp, Eucalyptus grandis
ggagcaccagcctcgggtcaaagttcccatgcacttcaagtggaggaaacccgagattcacccctcgggtttgtggtgaaggtggaggaccgcctgagttccgggagcggtgggagcgccgtggtggatgaggacgggccgcagctcgtggacagcggccattcatattttcattgcaatgactacccgggaagcttggtggccgtcaatgggttgcagtcagaggacgatggaagcgatgatagccgaggttactgctcagagattttcgccgctgctgaagagccgcatcaggagggaggcgtgcctaatggggtggtgggcgtggccctagttttaggttttcgccttttggtatgttctcgtaaatggttcaagtcaaatatgtgctcatgagactatgcaatgtttcacgaaggggaagaatctgtaaacgtttactggaactttggacatgaataaaactgacgtgtttggtcaaaaaaaaaa

SEQ ID NO: 59 - DNA, 456 bp, Eucalyptus grandis
tctcgccttcaggcagtgaataggaagctgactgcaatgaacaaacttttaatggaggagaacgataggctgcaaaagcaagtgtcacagctggtgtatgagaacagttatttccgccagcagacacaaaacgcaaccctcgccaccactgacacgagttgtgaatcggtggtgaccagtggtcagcaccatttgactcctcagcatccaccaagggatgccagccctgcaggacttttgtccattgcagaggaaactttaacagagtttctttcgaaggccactggaactgctgtggagtgggtccaattgcctgggatgaagcctggtccggattccattggaatcattgctatttctcacggatgcactggtgtggcagcacgtgcatgcggccttgtgggtctagaaccttcaagagttgctgaaatcctcaaagatcggccgtcgtggtat

SEQ ID NO: 60 - DNA, 455 bp, Eucalyptus grandis
tgacgatgtttgtggaggaggaaagagaccggaaaggcctttcttttgcacatatgacggggaggaaaatggagacgatgattatgatgagtatttacaccaacctgagaagaaaaggcgattgtctatcgagcaagttctgtacttggagaagagctttgagactgataacaagcttgaaccagataaaaaagttcagcttgccaaagaactcgggttgcaacctcgtcaagttgctatttggttccaaaatcgaagggcaagatggaaaactaagcaaatggagaaggatttcgataaattgcaagctagttttaactgtttgaagtctgattatgaaagtcttctcaatgagaaggagaagctcaaagctgaggttattcatttgacacaccagctagagcaaaggagcaacggaattctgaaccattcgacatatctgaacaattgcacac

SEQ ID NO: 61 - DNA, 406 bp, Eucalyptus grandis
cccaaatcaaatgatatcgggtgaaagattttgagttttttttttttttcatttgaattgtcaccgtactttttccgaaaccgggcacaatggagaataaattcaggggtacaatcatttgagttcatacgacatgcctaattacatgaactgcgaaactcaaaagttcaatctttctccttcccctgcatcagcgcctaattctgaaaaaaattgagcgtcagcaagtgtttagggatggatttcttgttttgctagaggggggattggctatgggaattgaggaggccacgaagaggcaatcgattttcagctatcctgaggatctttacaacgaggaatattatgatgaccaggcgccggaaaagaagcgccgcctcactcctgagcaggtgcatctgttgga

SEQ ID NO: 62 - DNA, 530 bp, Eucalyptus grandis
ctctctactttttatcttcttcttcttctccgtcttcttcttcactgatcactgcaaaaaaaaagaaaaagaaaaaaaaaaagtactcctccgcctccgcctcctcctcctcctgctccgcagccgtacgcaggcgcgcacgctcgacagcgcattcctcctcccctcgttcgcggcggcaggcaggcaggcaggcaggcagacactgcgcgtgccatgagaagaaggccgtgatggaatgggagaagcaggaacagcaccacccccaccaccaccaccacccccaccatcacccgcagcagcagcagcagcaccaccagcagcagcagcagccgcagcagcagcagcaagcgaaggaggctcagcagcagcagcagcagcaggggggagagggcatgggtaacgggacggcggccgggaacgggggcggagtgctgtacgtgaaggtgatgacggacgagcagctggagaccctccggaagcagatcgccgtctacgcctccatctgcgagcagctcgtcgagatgcac

SEQ ID NO: 63 - DNA, 452 bp, Eucalyptus grandis
gcccggggccccgtcctgctggccgagtacaccgagttcagcggcaacttcaccagcgtcgcctcccagtgcctccagaagctccctgccaccagcaacaagttcacctacaactgcgacggccacaccttcaactacctcgtcgacgatggcctcacttactgtgtggttgcagttgagtctgttgggcgccagattccaatggctttccttgagcggatcaaggaggactttactcacagatacgacgcaggaaaagctgcaacagcatctgctaatagcttgaacagggagtttgggcctaaactcaaggagcacatgcaatattgtgttgatcatccggaagagatcagcaaacttgctaaggtgaaagctcaggtatcagaagtgaagggagtaatgatggaaaatattgagaaggttcttgatcgtggtgaaaaaatcgaacttct

SEQ ID NO: 64 - DNA, 354 bp, Eucalyptus grandis
gccaagtagcaccccgtttgccccacattatctgtgatatgtaaacgtggtgggcctctgttagctacaatatgattggcatcatttaagcttttgcgtaatcatcagtgttctcaatttgcaaaataccattaacggatcttgcagcatggaaagcattttagagaggtacgagagatacacttatgcggagcgacagcaagtggccactgattcccctcaagtgcagggaagttggtcgcttgaatatcccaagctcgtggctaggatcgaagtcttgcagaggaacataagaaacttgagcggagaagagcttgatcccttgagtctgagagagctgcagtatttggagca

SEQ ID NO: 65 - DNA, 1239 bp, Eucalyptus grandis
ctctctctctccttccccttctgactttgctcaagcttctttcctttctttaggataagtgctacatgagcttgtcgctttgtgtttgatctcaatttcgcacatgaaggtgatgaagctcactaatagcccatcttcttttctctctctctctctctctgcgcgatttgttttgttcagcgaaagaagaagagataaatattgaagtgaagtgaacagctgcgatggcgacttactaccaccagagctcatctgacccagatggagccctacaaaccctcgtcctcatgaaccccgccagctacgtccactactccgatgccccgcctccgcaccagcaaccctcggcgatcttcctcaactcctccaccgccgggccgcccgcatcccagacccagcaatttgtaggcatccccctacccggcagcgccgccgactcgcagccctcgtccatgcacgtcaaccacgatctctcctccatgcatggcttcatgcctcgcgtccagtataacctctggagctccctcgacccgtccacggcggcgcgtgaggcctcccgcacccaccagcagcaggggctctcccttagcctctccccgcagcagcccccaccgaccccagctgggtaccgttcctttgtccgggccgagcgcagtggcgatggagcagcgggttctcagcaccctccagcaatttcaggcggtgaggacgtgcggatctcgggcgggtccccatcgtcggcctcaggcgtaaccaatggggcggcagttgggtcgggcatgcagggggtgttgctgagctccaagtacttgaaggccgcacaggagcttctcgaagaggttgttaatgttgggaacaccggaatcaaagctgagatgctgaagaaggccagcggccaaagtaagccgggtggagaatcagcggcactgaaggaggaaggaggtggcgacggcagtggtaagcgcggcgcagaactgtctatggctgagaggcaggaaattcagatgaagaaggctaagctcataaacatgcttgatgaggttgaacagagatacagacagtaccacaaccagatgcagatcgtgatatcctcgtttgagcaagctgcggggattggctctgcaaggacgtacacggccctcgcgctgcagaccatctcaaagcagttccggtgcctcaaggacgcgatagcaggccagattcgggccgctaataagagcttgggcgaggaggatggcc

SEQ ID NO: 66 - DNA, 371 bp, Eucalyptus grandis
gttgagcaggtacagtttcttgaaaagagttttgaagtagagaacaagctcgagccagatcgcaaaatccagttggcaaaagacctcggattgcagccacgacaggtagcgatatggtttcagaatcgtcgtgcacggtggaagacgaagcagctagagaaggattatgaaactttgcaagcttcttttaacaccctgaagtcagactacgacactctcatcaaggagcggaatgatctgaaagccgaggttcttaacctcacggacaagctgcttcacaagggaaatgagaaggagagttccgagtcgtccagcaaatcatctcaagggctattccagaaccccattgctgattctgtttctgaggacga

SEQ ID NO: 67 - DNA, 387 bp, Eucalyptus grandis
ggccatcattagttccgatcaaatggagcgaaggatgttagaagcagctcggaagggcaatgtccatgagctggaagacttgatcagcagcaatgagctcatcctcgaggagatggatcttgaaggagccggtcacacgccgctgcatgtcgcctgtgtggctggccatttggatttcgttcgagagctcctgaagcgtacgccaaagcttgcggaaaaggtgaacacggatggtttcagcccgctgcacatcgcggctgctcgaggtgatgtcgagatcgcgagggagctcttgacaatgggtccacacctgtgctccgtgaagggacgggagagaagaatccctttgcattatgccgctatgaacgggaaggtcgatgtcatgaa

SEQ ID NO: 68 - DNA, 479 bp, Eucalyptus grandis
tccggctgtcgaaggaccagtccgccgtcctcgaggagagcttcaaagagcacaacaccctcaatcctaagcaaaagctggcactggcgaagcagctggggctgcggcccagacaagtggaggtctggttccagaacaggcgagccaggacgaagctgaagcagacggaggtggattgcgagtacctgaagcggtgctgcgagagcctgacggaggagaaccggcggctgcagaaggaggtgcaggagctgcgggcgctcaagctctccccgcagttctacatgcacctctcccctcccaccaccctcaccatgtgcccctcctgcgagcgggtcgccgccccgtctcccccctccgccgtcggccgccccctcgccgccgtcccggcccacccccgccccgtgcccctcatcaacccatgggcccctgcggccgctttagaaatagtggatccccccgggctgcaggaattcgatatc

SEQ ID NO: 69 - DNA, 684 bp, Eucalyptus grandis
cagaaagtgactcgccctagtgtaggagtagggagaggcttggatgcacattccatttcgcctccttgaagccctccaacggcgcagatatttccttgcttttttaggcaaaatgttgaaaaactggtgataataaaaagaagccctgtttagctataaagggaagccccatcctttctcctccctttctctttcttacctgtccccccctcccctctcctggctctcgctctctctctctctctcagttctttctcggacgggtgtctgtgcgtggcttttgatcggtcatcacctgaggccgcgtctgcaagcaagtgaagaaggaggacaaggaatatggcgagagagaagatcaagatcaagaagatagacaatgtgacggcgaggcaggtgacgttttctaagaggagacgagggcttttcaagaaagccggagagctgtcggtcctgtgcgatgccgaggtcgctgtcgtcattttctcggctaccggcaagctctttgagtactccagctccagcatgaaggacactcttgagaggtacaccctccaccacaataatcttgagaatatggaccaaccttctctcgagctgcagctggagcatagcaataacatgaggttaagcaaggaagtggcagaaaagagccatcgactcaggcagttgaggggtgaggatctt

SEQ ID NO: 70 - DNA, 356 bp, Eucalyptus grandis
gcaggttgctgtgtggttccagaatcgccgggctcggtggaagacaaagcaactggaaagggattatgattacctcaaatcttcgtacgattcccttctttcggactatgattccatcttgaaggaaaacgagaagctcaaactggaggtctattccttgacagaaaaacttcagggcaaggaagtcgatggagcaccaatgacaggcccctcggagccagctccgctggaggaggctgatgtccaggccgtccaattcagtgcgaaggtggaggataggctgagcacaaggagcgggggaagcgcagtgatcgacgaggaaggtccacagcttgtggacagtggcaactcgtacc

SEQ ID NO: 71 - DNA, 725 bp, Eucalyptus grandis
cccaacgcctccccaaacgcaacgcaaagattccatttttccctctcgccgtcgcgtgaaactccggccgccggcggcctcagatcaccccgcttcagcagcagcagcagcaagcgctgagcaaagaggagaaggtggctgctttcatggaggcccactgagtcttcagtccggagcttccgacccaagaaagggagagcagacgaagcagagggggagaggcaaagagagagatttgaggagctgggaagtgttttgggaaggagtggcatgatggggttttgcatatgtccgctggagacgccggcgaggctgctgtggacgaccagcttcttccgtcacaagctcatgctcttctaactcgcggcctccctgtgtagacatagtgtaaactcgtttgtacgtatatctacgtgttaagtgctttttttccagtgcctcgccggagtttcggtcaggctgggatacaggttgccggagatccacctcgggctgagaagggtatggaggcagggcgttttctgtttgatccccccgcgcttcaggggaacatcctcttccttgataaaggatcaagatccatgatgggcatggaggaatccccgaagaggcgccggtttttctgctcgccggacgaacttttcgatgaggaatattacgatgagcagatgccagaaaagaaacgtcgcctcactcctgagcaggtgcttctgctggagaagagc

SEQ ID NO: 72 - DNA, 523 bp, Eucalyptus grandis
ctgaagacccaaatcctccctcacttctaggtgcatagtttgatccctctcattctcatggatgaaatgtacgggctctgcggcggcggcggcggaggaggaggaggaggaggagaggagtactccgagagggcgctgatgtcgccggaaaacctggtgctgccgtcagagtaccaggcctggctgtgctcggccgggtttagggataatcgaatccccatgtacgggttcgggtcggaggagttcgtgtcgtcggcgtcgggcatgtccgagaccgcctcggtcacacccgaccaagaggatgcggcggagacagcgatcaagtccaagattaagtcccacccttcgtaccctcgtttgctccacgcctacatcgattgccagaaggtgggagcaccaccggaagtggtggggctgttggacgaaatccggccagagaacggcgtgtgcaagcgagacgccgccgtttctacatgccttggtgccgatcctgagctcgacgagtttatggagacgtacacag

SEQ ID NO: 73 - DNA, 646 bp, Eucalyptus grandis
ctaacctggccgtctctttcttcctgccattggctcttccttttgtattttcctctgctccctgctccctctctctctctaaaagcctgtgggcttatagggtccgttgaatggtctctctctctctctctctatcaatcgctctctacagagagcagagggaaattctcgagattggcgtctggggataaaagaccagcacagggaccatcttcttcattccctctctctcttcctcgactggaacaagaaaagctctgtgtgtagcggaggaagtgcgtccagagagagctctcttgctgcgggacattattctcatgaaggagataggaggctctcttcggcagagagagcccgcctccggagagagcctgcccgactgacccccgcgcagacattggcattcctccttcttcttccttccccctctcgagaacgttcggagaaaaaagcgacagagcggaacccgggactgcggatggcgctggcgatgcacagggagtgctcgagcaagcagatggacgcgagcaagtacgtgcggtacacccccgagcaggtggaggcgctggagcgggtctacaacgagtgccccaagcccagctcgctgaggcggcagcagctgatccgagagtgccccatcctctgc

SEQ ID NO: 74 - DNA, 471 bp, Eucalyptus grandis
ctcctctctcataagtcataattcacaggcgcggcacaaggcacgaaaagataaaaaaaaaaacgatggccggtgaggagccctattctgccgacacgaactcggacactttcgctgatgaagaaacgctgattccgagttcttccgaggctcttgagtccgcctgggttcctacttcctcgaccgctcatcatggttcaaaatcagtggtcaattttgaggacgtttgtggaggaggagacaccaatactgcgccgaggccatacctccgacagattgatctgaaggaagaagccgtcgaagaggactacggcgacgggaactttcagcctcctggtaagaagcggcggctatcggccgaccaagtccatttcctcgagaggcactttgaggtcgagaacaagctcgagcccgagaggaagatccagctcgccaaggacctcggcctgcagccgaggcaggtcgcgatct

SEQ ID NO: 75 - DNA, 766 bp, Eucalyptus grandis; identical to SEQ ID NO: 21

SEQ ID NO: 76 - DNA, 443 bp, Eucalyptus grandis
gttcttctccgattcttgacgaccgcaacaacaatatgcaacaacaacgcgggtggttcaggttcaggctcaggctcaggttgtttcttcatggacaacgatgtcaaggccaagatcatggctcatcctcactaccaccgccttctctcagcttatgtcaattgtcagaaggtgggagctccgcctggcgtggtggcaaagctagaggaagcgtgtgcatcggctgcgataatggccgggaacagcggcatgagcaacacaggttgcattggtgaagacccagctcttgaccagttcatggaggcctactgtgagatgctgactaagtacgagcaagaactctccaaacccttcaaagaggccatgctcttcctccagaggatcgagtgccaattcaaagcccttactcttggtgttccttctgattctgtggctttgagtga

SEQ ID NO: 77 - DNA, 529 bp, Eucalyptus grandis
tggaagcagtaaaggagtgggaataccccggcttcgttttttggaccagcagctcaggcagcaacgagccctacagcagcttgggatgatgcaacagcatgcatggaggccgcaaagaggacttcctgagagttctgtttctattcttcgggcctggctatttgagcattttcttcatccttacccaaaggattctgacaaaatcctgcttgcaaggcagacaggcttgacaagaagtcaggtctcgaattggttcatcaatgcaagagtgcgtctctggaaacctatggtcgaagaaatgtacaaagaagagattggggatgcggaaatggactccaactcatcctccgacacagccaagccaaaaacaggagatatcaagtcctccatggaggaccgggtggaagaagtgcaacagagttcaacagctacacagagatgcagctcaggccagctcatggactcatcattcgaccggactccagatgtcgaaatggcaggccactctgtgggattcaactacctgaac

SEQ ID NO: 78 - DNA, 941 bp, Eucalyptus grandis
acttaatgcaatctgcaaggttaagggttatgctgacccattacaatatcagagttgatgtctgaggtgcaagtcactcagatgaaatctgatggtacgctagaggagagtggtgaggcacggcgacttagaaattctttggaggaaatggcaaacgaaggcaagagccctagcatattgaaagaatgtggtcttccagaaaattctttcgtctcaattccacaaaaaatgacagaaaatcggtggtcctggtcggaggtcaaatatctctctaattgccttcttttggcactagatgcaagccttgagcattctcttttgggatctctgatgaatatggatagatatgctgctgcagagagttatcacaaacttgctatggcttttgcccctgtcccggatcttcacattatgtggttgttgcacttgtgtgatgcacaccaggagatgcagtcttgggctgaagctgcacaatgtgctgtggctgttgctggtgttgtaatgcaggccctagtagctagaaatgatggtgtctggagtaaagaccatgtgacggcactacgtaaaatttgcccaatggtcagcagtgagatcagctgtgaggcatctgctgcagaggttgaggggtatggtgcttcaaaactcacagtagactctgctgtgaaatatctgcagcttgcaaacaagcttttttctcaagctgagctttatcatttctgcgcaagcattctggaactcgtgattccagtttacaaaagcaggagagcatatggacagctggcaaaatgtcacaccttgctcaccaatatctatgagtcaatccttgagcaggaatccagcccaattccttttacagatgctacatattacagggtgggattctacggtgaaaaatttgggaagctggataggaaggaatacgtttatcgggagccccgtga

SEQ ID NO: 79 - DNA, 436 bp, Eucalyptus grandis
cccacaccaagactcaccaccatcactcaatcgcaatctccaaccccaccaagtctatgtcccaagactatcaccaccccagcatcttcgccttctcaaataacggcttcgagcgacccgacgttgccgcggcctccgctgcctcagaccaagaacagcagcaccatgtagcccagcagatctgccgtgacaagcttcgagtgcaaggctttgaccaacctccaccgccacaactggttggcatggaggaggaaccaggcgggctgcccgcgtacgagaccgctgggatgctatctgagatgttcaatttccctcccggcggtgcagccgctgccgaattgctggagcagccgatggcgtcgggttatcgggctgcccggccatcactgccaaccgtgagtggtacggctcaaaaaacccaggtgtgtataggcga

SEQ ID NO: 80 - DNA, 377 bp, Eucalyptus grandis
atcgttgatcacatggatttagagccatggagcgtgcctgaagtattgcgcccactttacgagtcgtcaactttgctcgcacaaaggacaacgatggcggctttacgcaatctgaggcagatctctcaagaagtttcccagccaaatgtcactggttggggaagaagacctgcggcactgcgtgctttaggtcagagattgagcaagggttttaacgaagctgtcaatggatttatggacgatggttggtctatgttggaaagtgatggcgtcgatgatgttactcttctcattaactcatcgccagccaagatggcaggcgtgaacatttcttacgcaagtggttttccttcaatgactagtgcggtcttgtgtgc

SEQ ID NO: 81 - DNA, 478 bp, Eucalyptus grandis
aggtttgtcgatgccactggtgttcttctgagtctagattgatagagaaggaccggaagtcaccaagaaaagggtcttatctggtttcttgatagccttttttggttttgtattgagaattcacttcgttcagagaggagagagcctgtgagagtagtgatcggagatggcgacggcctttgcagggacgcagcagaagtgcaaggcctgtgacaagaccgtgtatctagtagatcagctcactgctgacaacaaggtcttccacaaggcctgcttcagatgccaccattgcaagggcactctgaagttgagtaactattgctcctttgagggtgttctatattgcaagccacatttcaatcagctctttaagatgactgggagcttggataaaagttttgaaggcactccaaaaactgtcaatagatcttctgagcagggccaaagtaatgccaaagtctcgagtatgtttgccgga

SEQ ID NO: 82 - DNA, 493 bp, Eucalyptus grandis
cagatgatgatgaggatgacgatttgtttcaagatcgttttagcattgcatacaaccttgaccgagagtttgggccaagacttaaggagcatatgcagtactgcatgagccatccagaggagatgagtaagctatccaaattgaaggctcagatatcagaggtcaaagggattatggttgataatattgaaaaggtgttggaccgtggggagagaattgaacttctggttgacaaaacagagaacctacaattccaggccgacattttccaaaggcaaggaaggcaactgcgtaggaagatgtggtttcagaatctccaaatgaaggttgtggtggctggagcagttgtcatagtaatattcttgctgtggcttatagcaaagtggggaagtaaataaaacttgttctcaggatgtaaaaagaaaaggtacaatatgattttgtatctggatatgtttgttggtatgtggagctagcctaccacttaggattt

SEQ ID NO: 83 - DNA, 764 bp, Eucalyptus grandis
atgcattctcaacaaatacagtcgattgccttatcagcaggaaacattagtgaaattatgcaatccaaacttcaatgcgctgcttccaccagtttctcttccttcttatcctttttgcccccagtgaagaatttgtaccctccatagataagcacaccccaaccagacaaagacacaattacaaaatgctcttccttccatttagatggactcaaagggtcatcccaaacattaactcttggtggtccatggtgatccgccgcgccggcgaggccgcgccgctggccgaaggcggcggcttgggccgacagccccggagaggaggcgcgcgagagagcggcggcccggcgagctgcgatcgcggctaacgcagtagccatggctggatcgagagagagaggagagagtgtgctcttgatagccttttttggttttgtattgagaattcacttcgttcagagaggagagagcctgtgagagtagtgatcggagatggcgacggcctttgcagggacgcagcagaagtgcaaggcctgtgacaagaccgtgtatctagtagatcagctcactgctgacaacaaggtcttccacaaggcctgcttcagatgccaccattgcaagggcactctgaagttgagtaactattgctccttcgagggtgttctatattgcaagccacatttcaatcagctctttaagatgactgggagcttggataaaagttttgaaggcactccaaaaactgtcaatagatcttctgagca

SEQ ID NO: 84 - DNA, 490 bp, Eucalyptus grandis
ggtttatgcccctatcgattcaacagcgatgaccatcgcgttgagcggcgaggacacttccacagtgcaaattcttccatctggcttcacgatctccagcgatggccggattggcacaagctccagcaagccagcaggtacacttctcactgtggcgttccagatattggtttccagccactcaggtccagagcagctcagcgtggaatccgtggcgaccgtgaacactctcattagtgcgaccgttcagaaaattaaggctgctctaaattggtctgccgcggaatgatttttttttttttttaatatttgactaggcggaatgatccttctatttgtgttgatggtttgtaccgaaagatgagatgatataatttcatagcgagatgatttaatttcacatcgtcaccaacacgtggtgagtacaaccagttcctgtccataatgatctaagttggtgtttatattggaatgactttttgcggaactg

SEQ ID NO: 85 - DNA, 427 bp, Eucalyptus grandis
atcaaatggagagagcagctcgaaagggcaatatccatgagctgaatgacttgatcagcagcaatgagcaaatccttgaggagatggctcttgaaggagccggccacacgccgctgcacatcgcttgtatgggcggccatttggatttcatccgagagctcctgaagcatatgccgaagcttgcggaaaaagtgaacccgtgtggtttcagcccactacacatcgcggcagctcgtggtgatgttgagatcgcgaaggagctcttgaaagtgaatacagacctgtgctccgtggagggacgggagagaagaatccctttgcatgatgctgtcatccacggggaggtcgatgttatggagatactactatctacttcacctgagtctgttgaaaagaaaaccgcccggaaggagaccgtgcttcacct

SEQ ID NO: 86 - DNA, 365 bp, Eucalyptus grandis
gccaagtgacatcttcctcttgcaactttgcaatggagtggatgaaaatgctgttggcacttgtgctgaactacttttcgctccaattgacgcatccttttctgatgatgcacccattattccttcgggattccgcatcattcctcttgatccaggatcggatgccttcagcccaaaccggacacttgatcttgcctcagctcttgatgttggtcccacaggcaacaaagcggtcggtgataattctggtcatagtggaaacaccaaatctgtgatgactatagccttccaattcgcatttgaattacatcttcaagagaatgtggcgtccatggctcgtcaatacctcagaagtattatagcat

SEQ ID NO: 87 - DNA, 180 bp, Eucalyptus grandis
tttctctcttttctctcaagctctctccttcatcttcaagaacacaagaccaaatcaatctcccccatctcctcaaatgggcatagatgatctgtgcaacacaggccttgttctgagtcttggcctcgagacgcccttcaagatcgaagcccagaggcaagccaaacagcgccttaactt

SEQ ID NO: 88 - DNA, 468 bp, Eucalyptus grandis
aaatcaatgcccccgaaagcgacccttcacttacacccgccatcaatagacaccccttctcggagacccaggccaccaccctcctccaggccaccaccgccatgatctcctccgctgtccaggtggcgggcccggcgcacatagatgacccctgccgccgcagcatcggaggcagcacgggcttaggcggcgccacggacatcgggtccgcgctgatccggtttgggacagccgcggcagcaacgggcgacgtgtccctcaccctggggctgcgccacgccgggaatgtgccagagaagagctctttctcggttaccgacttgggcggctgttaattagtaattaaatttttgcctgtcatctagctacctttgggaaaaaaaacaattttagaaaaagaaaacctttctttttcctccattatcattaatctagcttaaaaacaagatacaccaaccctcaggaaac

SEQ ID NO: 89 - DNA, 441 bp, Eucalyptus grandis
cttcaatgaaggaaatggtaccccaagcaaacagaaaatcaaagagattactaccgaactgagtcaacatggacaaatttcagaaacgaatgtctataactggttccagaaccggcgtgcacgatccaaaaggaaaatgcagaatgcaaccggcaacaatactgaatctgaagctgaagcagaagttgagtccccaaaggagatgaagacaaaaccggagatctttcaatctcagcagaatcctgtatcaaggaacgaagatttatgcttccaaagccctgagattagctcagatcttcattttgctgattcacagaccaaagtggagagcatggtttatccagatggcagtttgagatccaggaataggaacctaggccagctatctttctatgatgccatgatgtcaaattcaggcggtcttgcaggaaatgagcatct

SEQ ID NO: 90 - DNA, 744 bp, Eucalyptus grandis
ctcctattgatgaatctttcgcagatgatgctcctttgttgccatctggctttcgtgtcatacaattggatcctaaaacagatgggcctgcccctactcggacattggacctggcctctacgctggaggtgggatctggtggtgctcgtcctacttgtgaagctgatgctagcacctacaacctgcgatctgtcctcaccatcgcattccaattcgtgtttgagaaccatttacgggacactgttgccatcatggctcgtcaatatgtgcgtagtgttgtgggatctgtccagagggttgccatggcaattgcaccttccaggctaggtggccatctggggccaaaatctctctctggttctcctgaagctcttacgctggcacgatggatctgccgtagctacagaatttgtgctggagctgaactgttgagaggggactcccaagctggtgatgctgttttgaaggaattttggcaccattctgatgcaattatgtgctgctctgtgaatacaaatgtggcctctcctgtcttcaccttcgccaaccaagctggacttgacatgcttgaaactactctggtggccctccaagatattatgctggaaaaggttcttgatgaaggtggcaggaaagttctttcttcggagttcccgaagatcatgcagcagggtatcgcctatctgccagccggagtatgcatttctagcatgggaaggccagtggcttatgagcaagccgttg

SEQ ID NO: 91 - DNA, 509 bp, Eucalyptus grandis
gtccggctcactaaggaacagtctgctcttctggaagagagcttcaaacagcatagcactctcaaccctaagcaaaagcaagctctagcgaggcagttgaatctacggccccgccaagtcgaagtgtggtttcaaaacaggagagccaggacgaagctcaagcagaccgaagtggactgtgagttcctcaagaagtgctgtgagacgctgaccgacgagaaccggcgattgcagaaggagctccaggagcttaaggccctgaaactggcccaacccttttacatgcacatgcccgcggcgaccctcaccatgtgcccctcgtgcgagcggattggtgcgggcccgagcgtcgacggcgcagcgccgacgaagggccctttttcgatgacgacaaaatcacacttatacagtcatcactttaccaatccatctgctgcttgctgattagaagttattagggttttagagatattacagagagagagagagagagagagacatatatagac

SEQ ID NO: 92 - DNA, 363 bp, Eucalyptus grandis
ccattagagtttcacaatgacgtgagacttaccttcagcaatgcgatgacctataatcctcccagcaatgatgtccacttgatggctgatactctcaacaaattttttgacattaggtggaaaaccattgaaaagaaacttgttgtcggtggaccacaaccatcatcaacaaaatcagctccacctgaggaggtaaaagcagccaagtcaacagctcttcctaaaaagaggaaaatgtcgagtcaacaagaagttatgcctgcacctcttcttcaggtaatgacagatgaggagaagcataaactaggccaggaattggagtctttgctgggagagatgcccgaaaatattattgattttttg

SEQ ID NO: 93 - DNA, 110 bp, Eucalyptus grandis
acatgcagctctatgcgcctaccactctggcaccggcccgtgacttctggttgctgcgctacacatctgtaatggaggatgggagtcttgtggtatgtgaaagatcaatt

SEQ ID NO: 94 - DNA, 440 bp, Eucalyptus grandis
acagagagctcaagactcagctcttgcggaagtacagcggatatcttggtagcctcaagcaggagttcatgaaaaagaggaagaaggggaagctcccgaaagaggcccggcaacaattgcttgattggtggagtcgacactacaaatggccttacccatcagaatcacagaaactagctctagcagaatcaactggactagatcagaagcaaatcaacaactggttcatcaaccaaaggaagaggcactggaagccatcggaggacatgcaattcgtggttatggatgccactcaccctcattactacatggacaacatgctcggcaatccctttcccatggacatctctccgaccttgctttgaagtctatggttgatattgctaatattattcgaccctagtgtcattatgagctctaaatgtgctctttccgagtgc

SEQ ID NO: 95 - DNA, 413 bp, Eucalyptus grandis
cttggccattcaaggaaccagttgatgctcgtgaggtccctgattactatgacataattaaagaccctatggatttgaagacaatgaccaagagggtcgaatcagagcaatattatgttacgctcgagatgttcattgcagatgtcaagaggatgtttgctaatgcacgcacctacaattcccccgacactatatacttcaaaattgcaacaaggctggaagctcatttccagagcaaggtacaatcgaatctccagtctggtgccggaaaaattcaacagtagagcattcggtagactggaggccctgaccttacttctctctatatgaatatgtggagccttggatacttactctgatccatgattgcgctggggaattaactagcttcgattgaccatgtaactgaagac

SEQ ID NO: 96 - DNA, 706 bp, Eucalyptus grandis
ctttggctttccttctccatctctctcgctctctctttgggattcgtgtgttctttcttcttttttgcaccacccgagattttccgaaagctgaagtggccggggagtgaagtttaagagagagagagccatcaccaaaagcccgaagatcatggggagaggaaagatcgagatcaagaggatcgagaacacgacgaaccgtcaggtcaccttctgcaagagaaggaacggactgttgaagaaggcctacgagctctccgtcctctgtgatgccgaagtggccctcatcgtcttctccagcagaggacgcctctacgagtactccaacaacagcataaggtcaactatagagaggtacaaaaaggctaattcagatagttcaaacacaagcactgtcacagagatcaatgcccagtattatcagcaagaatctgcaaagttgaggcagcagatccaaatgctgcaaaactccaacaggcacttgatgggtgattccttaagttcactctctgttaaggagctgaagcagctggaaaataggcttgaacgcggcatcacaaggatcaggtcaaagaagcatgagatgttattgactgagatcgagtacctgcagaaaaaagagattgagctcgaaaatgaaagtgtgttcctccgcacaaagatagccgaggtggacaggattcagcaaggaaacatggttgctgcc

SEQ ID NO: 97 - DNA, 396 bp, Eucalyptus grandis
gaaaaatggggagagggaagattgagataaagaggattgagaatgcaaatagcaggcaagttacattctcgaaaaggcgttctgggttgctcaagaaggcgcaggagctctctatcctctgtgatgctgaggttgctgtcataatcttctcgaatactggcaagctttacgagttctccagttctggaatgaaacagatactatcaagatacaacaggtgtcaagattctccagagtccactgttgtagagtacaagccagagtctacgaaagaagatgataaggtggtagacaccctaaaagatgaaatcgcagagctgcagatgagacaactaaggctactgggcaaggacttgaatggcctgagcataaaggaattgcagcaccttgaacagc

SEQ ID NO: 98 - DNA, 379 bp, Eucalyptus grandis
ctcgatacagctcttaagcgcatcaggaccaggaagaaccaactcatgcacgagtcgatttctcagctgcaaaagaaggaaaaatctctacaggagcagaataacgtgctctctaaaaagatcaaagaaaatgagaaggtaatgagagagagtggacaatgggagcagcaaaccccagcaccgaccacatcctccttcatgctacaacccactttgcctcttccttccctcaccattggcaacacgttccagacaccgcatgtacttggaggagcagaacaagaggagagatctcaagcccgaccagccaacacgctcatgccgccttggatgatacgccgttcaaatgaatagagagatagagaccaacaacattctc

SEQ ID NO: 99 - DNA, 421 bp, Eucalyptus grandis
gtacttgtctgacttgatgagcagtgggcacaagcacaagaggaggaagcagttgcagacggtggagctgaaggtgaggatggactgtgatggctgtgagctcaaggtcaggaaggccctctcttctttagacggagtgaagacggtggagataaacaggaagcagcagaaggtgacggtgaacgggtacgtcgaccagaataaggtgctgaagagggccaagtcgacggggaagaaggcggagatatggccctacataccctacagtgtggtggctcaccagccgtacatcgcccagtcctacgacaagaaggcacctcccggccacgtgaggaaggtcgagccaaccgccaccagtgccatcgtgacccggcacgaggacccttacatgaccctcttcagcgacgacaaccccaatgct

SEQ ID NO: 100 - DNA, 460 bp, Eucalyptus grandis
aggatcgagaacaagataaaccggcaagtgacgttcgcgaagcggaagaacgggctgctcaagaaggcgtacgagctctcggtgctctgcgacgccgaggtcgcgctcatcatcttctccagccgcggcaagctccatgaattctgtagcggcccaaggtatcgcgtatttgtatgttatcacttgtttttctcgttaatgttatgatgagacatcagggggagaaacccagaactgagatcacactgtttcattaaattctctcgtccaaattctttcgggaaaccctcagatcttggtgatctggatcttggtgctgccctaaggagatggcgatttattggtttttcttcttttttgggtttcagtttcttgactctttttgcgatctttccgttcaccatgaaaaaaagctttcagccgcacagtttcttgcttcctggggtttctgatcttctct

SEQ ID NO: 101 - DNA, 423 bp, Eucalyptus grandis
gatcaatgctggtcgctttgaccagagaacaacgcacgaggagagacggttgactctggaaacattattacatgatgaggaaaggtatcaagaaactgtgcatgatgttccctctctgcaggaggtaaatcgaatgattgctaggagtgaagaagaggtcgagctatttgatcagatggatgaagaactggattggacagaggagatgaccaattatgaactagtgccaaaatggcttcgggccagtacaaaggaggtcaatgctgctattgccactctatcaaagaaaccatcgaaaaacactttgtttgctagcacaatagtggaacctaatgaaccggtatcggaatcagtgagaaagagggggcggcccaagagtaaaaagcatcctaattacaaggaactagatgatgacaatgaaga

SEQ ID NO: 102 - DNA, 381 bp, Eucalyptus grandis
ttgccgcccaactgaagcacagctgcgagctactgggtgagaaggacggcgcgggcagctccggtataaccaagggcgagacaccacggctcaagttgctcgaccagagcctgaggcagcagagggctttccaccagatgggcatgatggagcaagaggcctggaggccgcagcggggcctgccggagcggtcggtcaacatactgcgtgcatggctcttcgagcatttcttgcatccgtatccaagtgacgctgataagcatctgttggctcgacagactggtctctccagaaaccaggtctcgaattggttcataaatgccagggtccggttgtggaaacccatggtggaggagatgtaccagcaagagtccaaagaag

SEQ ID NO: 103 - DNA, 473 bp, Eucalyptus grandis
ctctattccactcctaattcatgcttttcgtgacaataattttgtagcatgctcaaaactctagagagatatcagaagtgcaactatggagccctggagccgaacgtgtccgcgagagaatccttggagttaagctgtcagcaggaatatttgagacttaaggcacgttacgaagccctacagcgaactcaaaggtattgaagtttctattgtccttttaattaaatgtcagcattcgcgggatgtagttattttcctacatgattggggtctatctgtgtcatcgtgaactaggaatcttctgggagaagaacttggccagttaagcagcaaagaactcgagtccttggaaagacagctagatgggtcattgaagcagatcagatcacgaagagtatgtaaattatattcacgaattctatctaagtcacatcctgagttattgtgaatacaagttactgtgtcaatcgctg

SEQ ID NO: 104 - DNA, 634 bp, Eucalyptus grandis
caaaaatagaggatgttagggaggagatactacggaaaaggagagccggaaaattacccggcgatactacttctgtgttgaaaaattggtggcagcaacactcaaagtggccatatccaactgaagatgacaaggcgaaacttgtggaggagacaggattgcagctgaagcaaataaataactggttcatcaaccaacggaagcgaaactggcacaacaattcccaatcggtcacctccttgaagtccaagcgcaagaggtaggcgcaacggaccatcatgcttgtctttgtgccgctaactgaaacacgaaacttatcaatcggtattgactctgatataaccttctgatcgactgggggtatactttatagctagagctgaacacttgtggtggtggatcaagcagtgatggtaagtagatgattcattatggaattagggcctgtaacaaatgatgcaaattccagtagattacatacacaaaacccagaaaattgatgtctttttgtttggttagaagtgcttctgttgcctaatctctcttgtatttaggcccaaaacaaacaacatgttgatttgttttctgtttttataaaattgttgtttttggcagtaaaaaaaaaaaaaaaaaa

SEQ ID NO: 105 - DNA, 483 bp, Eucalyptus grandis
ctccagtggatatcacaggaatgcaggcggtgatgaccggctgtgactctagcaacatagccgcactgccatccggtttctcgatcctgcccgatgggatcgagtcgaggcctctagtcatcagctcaaggcacgaggagaagagctcagaaggaggatcactgctcacaatagcttttcaaatcctaacaaatacctctcccacagccaagttaactgtggaatctgtggagtctgtcaacactctcatatcctgtacattgcggaatattagaacgagcttgcaatgtgaggatggatgacaactttaagttttatttaaagtagatagggataattaactgtacaactaatagggtggagaaaaattagcagttcaaaagcaatggctttttttcatttgttctttggttggattggaaggcttggcttggttttaagcatgtttttatgcagaaagtggtgactggcgggcaagagaga

SEQ ID NO: 106 - DNA, 404 bp, Eucalyptus grandis
tcgagaacaagatcaacaggcaagtgacgttcgcgaagaggaggaatgggctcctcaagaaagcctacgagctctccgtgctttgcgacgcggaggtcgctctaatcatcttctcccatagaggaaagctgtacgagttctgcagcagctcaagcatgctcaaaaccttggaaaggtatcaaaaatgcaactatggagcaccggagcctagcatctctacccgggaagcacaactggagctaagcagtcagcaggaatatctgaaacttaaggcacgctatgaagccctacagcgaacgcaaaggaatcttcttggggaagaattaggccctctgagcagcaaagaactggagtctctggaaaggcagctcgattcatccttaaagcagattcgatccactcga

SEQ ID NO: 107 - DNA, 527 bp, Eucalyptus grandis
gctagaaaagcgatccattggtcaggcagcagaacagctttatctattctcttgtacgacgcgcagtagacgaagtaacatagcccaccatatgcaagagccgaacttggccatgatgggcggcggtggtggcggcggcggcgggggcggggggatcgtcggtggcggcggcggggggctgggcagcgaggcgtcgttctcgggcgatcacccgcagcgccagctcaagggggagatcgccagccacccgatgtacgagcagctgctgtcggcccacgtggcgtgcctccgcgtcgcgaccccgatcgaccagctgccgctgatcgacgcgcagctggcgcagtcgcaccacctcctgcgctcctacgcctcctcggtgcagcacggccacagcagcctctctcctcacgacaggcaggagctcgaccatttcttggcacaatatctggtggtactatgcagcttcaaagagcagctgcagcagcacgttcgagtccatgccgttgaagccgtcatggcctgtcgtg

SEQ ID NO: 108 - DNA, 482 bp, Eucalyptus grandis
cccatcccgatgagaagcaaaggcagcaactgagcaaacagctgggcctcgctcctaggcaagtgaagttctggttccagaatcgcagaacgcagctcaaggcaattcaggagcgccatgagaattctctgttgaaaacagaaatggagaagctcagagatgaaaacaaagccatgagagacaccatacagaaatcttgctgccccaattgtggctcagccaccacaagcagagataccgccttgacaactcaggagcagcaactccgaattgaaaatgctcgactgaaagccgaggtcgagaagctccgaacagctctaggaaagtacactccagggacggcatcgccttcttgctcagccgggaacgaccaagagaacaggagctccttggatttctacaccggaatctttgggctcgacaagtcgaagatcatggaattggtgaaccaagcgatggaagagctcaagaagatggctact

SEQ ID NO: 109 - DNA, 343 bp, Eucalyptus grandis
ctcttcagctgaaccctccctctccccatctctcttttcttgctatgaccaacgacaagaacaccaggaacaaaaaaaaaaaaaagctccaataaaaaatctctacagggagagagagagagagcaagaactcaagaaaccctaaacttatctagccccgtgtcatcgaagagagcgagggagaaggagagggagagggagagggagagggagagagagggagtggaagtggaggaacgagcgagagaggaggagggagtgtactgattaatcggtatctttctatttatgtgcaagtggaattataataaggtggcctctccttttctccccttctttttct

SEQ ID NO: 110 - DNA, 617 bp, Eucalyptus grandis
ctcatccgaccttgtgagggaggtggtgcaatcattcatattgtggatcatgttgatctagatgcttggagtgttcctgaagttctcagaccactttatgaatcgtccaaaattcttgcacagaagatgactgttgctgctttgcgccatattagacaaatagcccaagaaagtagtggggagattcagtatggaggtagccgacaacctgcagtcttgaggacgtttagtcagaaattgtgcagggggtttaatgatgctgtgaatggctttgtggatgacggttggtctgttctaagtagcgatggggtagaagatgtcaccattgctgtcaactcatctccaaataaatttcttggttcccaatacaatgcaaccatatttccaaattttggaagaggagtgctctgtgccaaggcgtccatgcttcttcagaatgttccgcctgctgtgcttgtacgctttctgagggaacaccgctctgagtgggctgaccatggaattgatgcatactcagctgcatctttgaaaactagttcttatgccattccatgtgtgagacctggtggtttccctagtagccatgtcattttgcctcttgcccacactgttgaaca

SEQ ID NO: 111 - DNA, 380 bp, Eucalyptus grandis
gctcttcgaacactttctccacccctacccgaaggattcggacaaagtcatgctggccaaacagacagggctcactagaagccaggtgtcgaattggtttataaatgctcgagttcggctttggaagccgatggtggaggagatgtacacggaggaaatcaaggagcaagaacagaatgggggaggagcagaggaaaaaccaagcaagagtgaacgcgaggactcagcatccaagtcctctggcctccaggacaaggcccccaactccaatgagaacagcaccaagagcttcaaaccaaaggagatcacctcgaggaaccacgacacccctgccatctctactaattcggcttcctccatcgggggaaacgtccgcagca

SEQ ID NO: 112 - DNA, 348 bp, Eucalyptus grandis
gacaaattgatgaaacatgaatatggatgggtgtttaacactccggttgatgtaaagggcctcggtttgcatgattactatagcatcataaagcatccaatggacttgggcagtgtgaagacaaggctgaaccggaactggtataagtcaccgaaagaatttgcagaggatgtcagacttacgttccgtaatgccatgacatataaccctgaagggcaagatgttcatgtcatggctgagattctgtacaagatatttgaggatagatgggccattatagagtcagattataatcgtgaaatgcggtttgcgttagactacgacatgggtcttcctacacctacctca

SEQ ID NO: 113 - DNA, 350 bp, Eucalyptus grandis
ccctcatacggaaatgggtattctcctccacaatatggcaatggacctgcatatcaccctatgccaacatactacccgatgggctacaggatctgtgctggatgcaatacagagattggtcatggacggtttttgagttgcatgaatgctgtttggcatcctgaatgtttctgctgccgtgcttgcaccctgccaatttctgattatgagttttctttatcaggcaattatccttaccataaatcttgctacaaggaacactaccacccaaagtgtgatgtctgcagtcactttatccctacaaaccttgccggtcttattgagtacagggcgcatcccttttggagtca

SEQ ID NO: 114 - DNA, 534 bp, Eucalyptus grandis
acatggccagaggatatttgctcggtcaagagcgacatgttcgattctgaaagtccgcattacactgacgctgcccactcttcgctcttagagcccggcgattcttcctatgctttcgaacctgaccattcggacctatctcaagacgaagaagataatttgagcaagagccttttgtccactcgcaattacccaaagctcgaaaactctgactacgccatcctgcctccaaattcgtgtaactttggattccatgctgaggatcctgccttttggccttggtcatactgaaggcgtccttgatgccgttcactccctttgttttcttgtatcatatatgaggggatacgctataagtatgcaataagctccatcaatagctagcatctgtccaaatgctgtagtgagctttctcaaggaagttggaacctgtgttgatttccttttctttaggttttgtccttcaatgggatcgtctgttttctatgtaaactaaataaagaaaccttgtttatcaatgcaaaaaaaaaaaaa

SEQ ID NO: 115 - DNA, 450 bp, Eucalyptus grandis
aagaaggtaaactcgggcacagcaacagtagcaatagcttggacaatgggaaatatgtgaggtacacgcctgagcaggttgaggccctcgagaggctctaccacgagtgtccgaagcccagttcactccgtcgccaacagctgatcagggagtgtcccattctctccaatattgagcccaagcaaatcaaggtctggttccagaaccgaagatgcagggagaagcagaggaaagaagcttcccgtttgcaagctgtgaacaggaagctcactgcgatgaacaagttattgatggaggagaatgataggttgcagaagcaagtttctcagctggtgtatgagaatggctatttccgccaacacacccagaacacgacgcttgcaaccaaagacacaagctgtgaatcggtggtgacgagcggtcaacaccagttgacatctcagcatcctc

SEQ ID NO: 116 - DNA, 501 bp, Eucalyptus grandis
ggaagaaaatatgcagcatttgaaggacgaagctgcgaacatgatgaagaagatcgagctcctggaagattcaagaaggaagctccttggtgaaggtctaggatcatgctcgatagaggaactgcaacagatagaacagcagctagaacggagtgttatcagcattcgtgctagaaagactcaggtcttcaaggagcagattgacaagcttaaagagaaggagaagatgttgacagctgagaatgcaatcttaactgagaagtgtggaatcaagcccccacaaagagcaaatgagtgcagggatagtccacttctcagagagagcaccccgagttcggaggtggagaccggtctcttcatcggaccaccagagaccagatcgaggcgcctgccgtttcagaattaaaaatatagccctagcctctcaaagtttcaaaatgtcacaaggcagacgggcagaaaacaaccaccgaccatggccgaagaacaccaccaccacct

SEQ ID NO: 117 - DNA, 372 bp, Eucalyptus grandis
gacaaggatccgaagagacccgtgagggacccggtcttcgccgccgtcccagataagttcgtcgcgagcatgatgaagcggtgcggcctgatcttgacgaaggttatgaagcacaagcacgggtgggtgttcaacacccccgtcgacgcggtcgggttagggcttcacgattaccaccagataatcaagaaccccatggatctcggcaccgtgaagacgaatctcgagaggaatttctaccactcgccgcaggagttcgcggccgacgtgaggctgaccttcaacaacgcattgacgtataaccctaaggggcacgacgtgcatcacatggcggagacgctgctcgtgcagttcgaccagatgttcgatcct

SEQ ID NO: 118 - DNA, 378 bp, Eucalyptus grandis
gtgagcctctcccgtgtcgagaagcacgcgtcgagcgccatgaacaagctccacgaagccgccatgaaaggcgacctcgcggccctccaagacctgctgttgcaggacccccagatcctccacaagaccacttcttcgtcctccgacggcacgcccctgcacgtttcctgcctctcgggccacgcgtccttcaccaaacacctcctcacccacaacccggagctcgccaaggaggccgactcccgcggctccctgcccctccacgtggcgtgcgcgaagggcgacgtggagatcgtcagggccctcgtggccgtcgacccggccgggtgtctccggtatgatcgcgaggggaggacgcctctgcacttggccgccatc

SEQ ID NO: 119 - DNA, 414 bp, Eucalyptus grandis
cgacgacctcgacaacgagagggcgtcctcccgcggcggcggcagcgacgaggaggacggcgacatgtcgaggaagaagctccggctgtcgaaggaccagtccgccgtcctcgaggagagcttcaaagagcacaacaccctcaatcctaagcaaaagctggcactggcgaagcagctggggctgcggcccagacaagtggaggtctggttccagaacaggcgagccaggacgaagctgaagcagacggaggtggattgcgagtacctgaagcggtgctgcgagagcctgacggaggagaaccggcggctgcagaaggaggtgcaggagctgcgggcgctcaagctctccccgcagttctacatgcaccttttcccttccaccacccttaccatgtgccccttctgtgagcgcgt

SEQ ID NO: 120 - DNA, 313 bp, Eucalyptus grandis
gccgattacgacgagggcggcgacgacaatccggggagccgccacccggtgacccggcagttcttcccggtggaggaggaggaggagctggaagaggatggcgagcgggcaggaatggggggagccgcagtgccgccggggttcccgagggcgcactgggtcggagtcaggttccgccagtcggatcaccatccaatcggatcgggcaagggctcaccgatattggagggttcacagcccatgaagaagatcaggaaagggccgaggtcgcggagctcccagtatagaggggtcactttttacaggcgaactg

SEQ ID NO: 121 - DNA, 415 bp, Eucalyptus grandis
cgacgacctcgacaacgagagggcgtcctcccgcggcggcggcagcgacgaggaggacggcgacatgtcgaggaagaagctccggctgtcgaaggaccagtccgccgtcctcgaggagagcttcaaagagcacaacaccctcaatcctaagcaaaagctggcactggcgaagcagctggggctgcggcccagacaagtggaggtctggttccagaacaggcgagccaggacgaagctgaagcagacggaggtggattgcgagtacctgaagcggtgctgcgagagcctgacggaggagaaccggcggctgcagaaggaggtgcaggagctgcgggcgctcaagctctccccgcaattctacatgcacctatcccctcccaccaccctcaccatgtgcccctcctgtgagcgcgtc

SEQ ID NO: 122 - DNA, 385 bp, Eucalyptus grandis
ggagagccagaagctcatggaggcggtccagaacggcgacgtctcggccgccgtggacctcctcgaccaagaccctctcctcctcgacaggatcatcgtcctcggcgtctccgacacgcccctccacgcggcctccgtgctcggccacgccgacctcgtccgggagctgctgcgccgcgccccccggctcgcctccgagcaggactcccggggcaactcgccgctccacctggccgccggcaagggccacggcgagatcgtgggcgagctcctgtcggccgacccggcggcggcgtcggcgcggaacctcgacgggcgggcgccgatccacgtggcggcgatcaagggccgggtcgacgcggtgggacggatggtcggggccgtc

SEQ ID NO: 123 - DNA, 282 bp, Eucalyptus grandis
gtatagcgggtatttaagtagcttgaaacaagaactctccaagaagaagaagaaaggaaaactacctaaggaagcccggcagaagctgcttagctggtgggagttacactacaaatggccatatccatcggagacagaaaaggtggcattggctgaatccactggtttagaccagaaacagataaacaattggttcataaatcatgttatagagtgttgggtaaagtccatggcaaccctaatgcaagaaatatttttgatgactaaggtcattcttaggtc

SEQ ID NO: 124 - DNA, 383 bp, Eucalyptus grandis
gcactttcagcttcggcatcctgaaggccggcgagggaggtgatggtgtcgcggacgacgaactcggggtgacgaggcagctgttcccggtgagggaggtggatgcggatatggagtggtgcggcgagtcgtcctcgcttgataagaggagcgatgtcttcttggttggtgcttgtaaggaaaaggaaggtccgaggctggcgatgccgcagcagcggaggaagagcaggaggggaccgaggtcaaggagctcgcagtatagaggggttactttttataggaggactggaagatgggagtcgcacatatgggactgtggaaaacaagtgtatttgggtggattcgacactgcacatgctgcagctagacctatgatcgagctc

SEQ ID NO: 125 - DNA, 350 bp, Eucalyptus grandis
ttccgaagatatgcagttcatggtgatggacggtcttcatcctcaaggtgccgctttatacatggatggtcactacattggtgatggtccctaccgtttgggcccgtaggctgtcaatccatgcaccataatcggatatataggtttgatgttcttgcagggtcctctggtggttgcttcgcctttacattatgtgtcctagtgtatgaattgttagttgtgccacctgatcaaatcatgttatagagtgttgggtaaagtccatggcaacccaatgcaagaaatatttttgatgactaaggtcattcttaggtcatatctatgtatcctcttatatgtcttggttttcc

SEQ ID NO: 126 - DNA, 539 bp, Eucalyptus grandis
gctgccttcgaaggcatggactcgctcccgagcccaaggaagaagaagaaccagctggtgaacagaagaaggttcagtgatgaacagatcaggtcactggagtctatctttgaatccgagtcgaggctagagcctcggaagaagctgcagctcgctagggaattggggctgcagccccgccaggtggccatttggttccagaacaagagagcccgatggaagtccaagcagctggagcgtgacttcgccattcttcgcgccaactacaacgccctctattcccggttcgagtctctcaagaaagagaagcaatccttggtcactcagattgagaaactaaaccaactcgtcgagaagccgcaaggagagggccagagctgcgggcatgatttggcaacgaacagcaccgatcgcgaatccgacaatggggttcccaagtatgaagacagtcagcctgtatttccggataaactaacgcgtttgatgggaatcccatgtgaggatgactactttggcctaaagagagcagagcctcctaa

SEQ ID NO: 127 - DNA, 493 bp, Eucalyptus grandis
taacctcacggacaagctgcttcacaagggaaatgagaaggagagttccgagtcgtccagcaaatcatctcaagggctattccagaaccccattgctgattctgtttctgaggacgaagtgtccagagtccccattcctacatggccagaggatatttgctcggtcaagagcgacatgttcgattctgaaagtccgcattacactgacgctgcccactcttcgctcttagagcccggcgattcttcctatgctttcgaacctgaccattcggacctatctcaagacgaagaagataatttgagcaagagccttttgtccactcgcaattacccaaagctcgaaaactctgactacgccatcctgcctccaaattcgtgtaactttggattccatgctgaggatcctgccttttggccttggtcatactgaaggcgtccttgatgccgttcactccctttgttttcttgtatcatatatgaggggatacgctat

SEQ ID NO: 128 - DNA, 627 bp, Eucalyptus grandis
ccgagaagaggacccccaagaagagagggaggaagccaggcctcggccgcgacacgccgctgaaccacgtggaagccgaacggcagcgccgggagaagctgaaccaccgcttctatgcgctgcgagcggtggtcccgaacgtgtccaggatggacaaggcgtccctgctctccgacgcggtgtcctacatcaacgagctcaagtccaagatcggcgatctggagtcccagttgcagagagagtccaagagggtcaaacaggaggtcaccgacgcaaccgacaacctgagcaccaccacctccgtcgaccatagtagcccatccggatgcggcggttctttgctcgaggtggaggttaagatcgtggggtgcgacgccatgataagggtccagtcggagaatgcgaactacccatcggcgaggttgatggcagcgatgcgggacctggagctccacatacaccacgccagcctgtcgacggtgaacgacctcatgctccaagacgtggtggttagtgttccggaggggctcaaaggggaggaagatctcagagctgcgcttcttcgggcactggaacaatgacggtcggagaaattgccgggggagagagagagagagtacgtactgt

SEQ ID NO: 129 - DNA, 385 bp, Eucalyptus grandis
ggaagatgacaaactagggagaaatagagcatctgcaaacgtggtacaatcatcttctgtaaaggggaggccttctggtggaactcttgttgtatgccctactagtgtgcttaggcagtggggtgatgagctgaaaaataaggtttcagagaaggctaagctatctgtatgtatgtatcatgggaccaccaggaccaaagatccatatgaattagctaattatgatgttgttctgacaacatattctatcgtaagcatggaggtaccgaaacccgctggttttaaagatgagaaggatagtctgcaagatgatgatgatgcgttttttggtaggaagagaaagcactctgctaaatctgagaaaagacgcttgaagaaagaaatg

SEQ ID NO: 130 - DNA, 345 bp, Eucalyptus grandis
tttcagattgtttatcaattggttgctagacttcaactccgcagattctgctattgatagtgcacattttcagattttgacagcatttgcgaatgcattccatgctttgcaacctctgaaagttccagcgttcagctttgcatggctcgagctggttagtcacaggagtttcatgccaaagattctctcagggaactctcagaaaggttggccttacttccagcgcctgctggttgacttgtttcagtacatggaaccattcttgaggaatgctgaacttggtttgccggttcattttctgtataagggaacacttagagtgctgcttgtgctgcttcatgattt

SEQ ID NO: 131 - DNA, 766 bp, Eucalyptus grandis
gccgtctgaggagtcttgctctctctctctctctctctctctcttcttatcttcttctcccccaaaaccccatcggacccaaaaaccctaacgaagatgaatagggagaggcttatgaagatggcgggttctgtccgcactggtggaaagggtaccatgagaagaaagaagaaggctgttcataagaccaccacgacagatgataaaaggcttcaaagcaccctgaagaggattggggtgaatgccatccccgcaattgaagaagtcaacatttttaaggatgatgtagttatccagtttttgaatcccaaagttcaagcgtctattgctgcaaatacctgggtagttagtggttctcctcagaccaagaagctacaggatatcctccctggcatcatcaaccaattaggtcctgataacttggacaacctgaggaagttggcagagcaattccagaagcaggtgcctggtgcggccactggttctggtgccactggaatgcaggatgacgacgacgacgaagtccccgagcttgtacctggcgagacttttgaggccgccgctgaagagggtcaggcgactcaggtgactgaggcgactcaggtgactgaggccactaaggtgactgaggcaactccggcctcctagagagagggattgttattgtcatttcaatacttgtagtgctattaaaatccttattttctctcatttgtctgtctttccattgtacttttaacgaactgttttaatctcgtgaggcttg

SEQ ID NO: 132 - DNA, 162 bp, Eucalyptus grandis
ggatcttgccaaaagggtgactcctgtgagtacgcgcacggcgtatttgagtcgtggcttcatcctgcacagtatagaacaagactgtgcaaggatgagactggatgtgctcgcaaagtttgtttctttgctcacaagcccgaagaattaaggcctgtctat

SEQ ID NO: 133 - DNA, 518 bp, Eucalyptus grandis
attatatcgtcgtgtctatttcccgaaatatttgcataactactagctgggtcctgtcgtaagccttacaataaatctactattagctgagtattgggtgtcgaataatttgcacgaagccacgaactattggcaatcgatctcatggcttcctcgagcggaacgtcttccgggtcaaccttgatccagaactcgggatcagaggagagtctgcaggccttgatggatcagaggaagaggaagaggatgatctccaaccgcgagtcggcgaggcggtcgcggatgaggaagcagaggcacctggacgatctgatgcttgtggtggctcagctcaggaaagacaaccagcagctaagggacaacgtgaacgtggtgaaccagcattacatgaccctggagaccgagaactccatcttgagggtccagatgaacgagctcaccaacaggctggagtctttgaaggatatactcggtatcctggatgccggagatggtggcagaccaggaaatggtggcgg

SEQ ID NO: 134 - DNA, 413 bp, Eucalyptus grandis
cctcgtcctctcccccccccaccggagcttcgaaatcgagcggcggcgacgcgatgacggacggccacctcttcaataacatctccctcggcggccgcggcggctccaaccctggacagataaagattttctcaggagggatttcatggaggagacaaggaggcggcaaagcagttgaagttgataaatctgacattgtcggggtgacctggatgaaggtgccgaggacaaatcaattaggtgtccgcaccaaagatggtttacattataagttcactggattccgagacccggatgttattagtttgaccaactttttccaaaatacctgcgggttaactccggaggagaaacagctttctgtgagtggtcggaactggggagaagttgatttgagtggtaatatgctgaca

SEQ ID NO: 135 - DNA, 278 bp, Eucalyptus grandis
agactggggcccatggggcccaaaactctctgcaatgcttgtggtatccgttacaagacaggtcgcctctttccagagtaccgtcccagtgcaagcccaacatatgtcccttctcttaacattgtatccaatgaaatcccttcaagccatttatggctttcccttcttcaaaaataaatcttttcaaccattgtcactcccacacgtatccgactcacagtaaggttgcaaaaccacgtctatgttgtccaaccttctccaaaagagtggcagagtac

SEQ ID NO: 136 - DNA, 237 bp, Eucalyptus grandis
ccggggtggcaatcgatgtgaagataatgggttgggatgaagtggttcgagtagagagcggacggaaggatcatcctgcagcaaggttaatggtggctcttcaagaattgaacttggagttgcagcatgctagtgtttctgtggtgaacgagctcatgatccagcaagccacagttaagatggggagtcagttgtacactcaggagcagctcaaggcagctctattggccgtaatct

SEQ ID NO: 137 - DNA, 371 bp, Eucalyptus grandis
ccaagccgccgatgaagaagcagaagagcaagcccgctgctgcttcggagacggccggaccggcccgacggtgcagccactgcggcgtgcagaagaccccgcagtggagggccggccccaacggggcgaagacgctgtgcaacgcgtgcggggtccggttcaagtcgggccggctgtacccggagtaccggcccgcgtgtagccccacgttttctagcgagctgcactcgaaccaccaccgcaaggtgctggagatgaggcgcaagaaggagtcaatgacgacgacggcactgggtcagcccgagcccggtcgggcccgtgcccagcttttgagggcaagggtgggttcttcctggcgccctcgggaaata

SEQ ID NO: 138 - DNA, 947 bp, Eucalyptus grandis
cagggaagacctgttccactgctaatgctgagggtcgctaagacagtggatgcttatctcggcgagatcgccacctacagtgaggtcagcattgcaaagttcaatgggattgctactatcgtgcctaaaggagcccgaaaggttgacgatgatctttatcgtgcgattgatatctacttgaagtctcacccgaacctcgatgaagatcatcgtcaacctttcgggctcctttaggccgcgggcctcctccgctgtggcaagagctgccgcctccggtggatcaattacctgcggccggacctcaagcggggcaacttcaccgaagaagaggatgagatcatcatcaaactgcacagccttcttggtaacaaatggtcgctcattgctgggcgtttgccggggagaacggacaacgagatcaagaactactggaacacgcacataaggaggaagcttttgaaccgaggcatcgatccggccactcacaggctgatcaatgagcccgcacaagatcaccatgacgagcccaccatttcttttgctgctaattctaaggagatcaaagagatgaagaacaacgcagagctcaatttcatgtgcaacttagaagagtcggcagacgtggcatcgtcggctcgagaaaggtgtcctgacctgaatctcgagctcggaatcagccctccttctcatcaactgcatcagcctgagccactcttgagattcactggtaggaaaagtgatttgtgtctggagtgtaatttggggttgaaaaatagccaaaattgcagatgcagtgttggggtgatcgagagtgaaactagtgttgggtatgacttcttgggcttgaaggcaagtgttttggattataggagctgaattttggtgaagaagatggataattgtgcagcgaagagatgaggcagagattgttattagttgaaatctgc

SEQ ID NO: 139 - DNA, 509 bp, Eucalyptus grandis
caggaatcgaaaaaaaccataaaaaaaaaaaaaaaagacgcagtttttatcgcctgtcgaacagaaaaaaccccccctccaacaacaagattttcccccttcaaaaagtcaagaatcgtttccccaccccgacagaaataaaaaagaacagaaaaaaaaacgtccagatcccatttgggagctcctcggtcgcgacccttttggtgattcctcgtgcgcccacgaagggtcctcgggtcgaatatccgcagattctgggttatcgttgtctttcggatcgggtttggtatattgggcgcattgggaggacgggaaaaattcaagaatgtccgttctgtcaaaaagcgattctgttgagattagggaggtttgggaatacaatctggaagacgagttttcgttcattcgcgaaatcgtggatgattatccctacattgccatggacaccgagttccctgggatggtccttcgaccggtggggaatttcaagagcagctccgagtctcatt

SEQ ID NO: 140 - DNA, 426 bp, Eucalyptus grandis
ccatgagaagaaagaagaaggctgttcataagaccaccacgacagatgataaaaggcttcaaagcaccctgaagaggattggggtgaatgccatccccgcaattgaagaagtcaacatttttaaggatgatgtagttatccagtttttgaatcccaaagttcaagcgtctattgctgcaaatacctgggtagttagtggttctcctcagaccaagaagctacaggatatcctccctggcatcatcaaccaattaggtcctgataacttggacaacctgggtagttagtggttctcctcagaccaagaagctacaggatatcctccctggcatcatcaaccaattaggtcctgataacttggacaacctgaggaagttggcagagcaattccagaagcaggtgcctggtgcagccactggttctggt

SEQ ID NO: 141 - DNA, 310 bp, Eucalyptus grandis
tactgggaaactctcatgttcttccaatctgaagagcttcttcacaacagctgcgtcagcgaggtgatttccagattcaatggtccgagttcgccggacgcggcggcgctgccggtagcatctaaaagcattgacctggaaagaaataggaggaagaagctcaatgaaaggctcttcgcactcagagcccttgtacccaagataagcaagatggataaggcttcgatagtgaaagatgctattgattacatccaagacttgcgtgaacaagaaggaagatccgagccgagatcgcagagctcgaatctgt

SEQ ID NO: 142 - DNA, 622 bp, Eucalyptus grandis
ccggggtggcaatcgatgtgaagataatgggttgggatgcagtggttcgagtagagagcggccggaaggatcatcctgcagcaaggttaatggtggctcttcaagaattgaacttggagttgcagcatgctagtgtttctgtggtgaacgagctcatgatccagcaagccacagttaagatggggagtcagttgtacactcaggagcagctcaaggcagctctattggccgtaatctgaggatctttgaaggatttcgttcaatgcaagttggcatcgactagacaatggaattgaagtttctccattgaaagcaagaacctgcccaatattttcaggttccgggtggtgcgaactctttgaacaatgggctttgtttagttgtgtggcttcgtctggtagattgaacccctagattgcaagttgaagtaaatacctagttctagcagatagtaattttttttccacgttgatctcctgcctgtcttcgatgtaaatagatgctccaaatttgaaactgatggggccgtttccttatcctttgttagcttgttctgccgtttgttgggttcaaccaagatcatgtctcttgtacaccaagcatcctgtaatcaatgcgcaag

SEQ ID NO: 143 - DNA, 369 bp, Eucalyptus grandis
cggaatttatagttgtcttaacttagatgctagcaatggcggaagttctgcaattgatccatctatctcaagtgccattttagacgatttttgcacaataaaggatggaccttttccgaatctttcagattgtttggtgggcaacttcagttcaagccaagatgttcagtctcagattacttctgcaagtcttgcagattctcaggctttctcaagacaagacttccctgataattcaggcggtacatcttcgagcaatgttgattttgatgagagtagcattttgaaaaacagcacatggcaacagcaagtagccccacctatgcgcacctatactaaggttcaaaaggcaggatcagtcggaaggtc

SEQ ID NO: 144 - DNA, 768 bp, Eucalyptus grandis
aagaattcgacacagtcaactttggaatagcagtgtcgagaaacagagtgttgctccctatgtgactggctaacatgtaaagcaggagattgaaggcagctccagcccaggctgtttcataaagtataccagaagttcttgtcgtttcctggtacaggggatagatcctagcaattctcggtacatattggccataaatgacgaacttcagtgactccttcgacattaaaggaacctggtacgtcatcgctgctgccgaggtacacattcgcgagaacccatctctcgttggtttccaattcgaagttcgtcgcgtcgccctctcgatctttgaggaaagcgaggacagggttgcgctctgttcgcgccatggggtcttctgcttcttcccagaggcccgacaaccttcaagacaaagttggccctgtctccgtgagtgatgaagagtggaagaaacgcctgactccggagcagtattacgttgcccggcaaaagggcactgagagggctttcactggggagtattggaacaccaagacccccggaacttatcattgcgtttgctgtgacacacctctatttgaatcaaatacaaagttcgatagtggaactgggtggccatcttactatcagcccatagggaacaatgtcaaatcaaaattggatctctcgatcattttcatgccacgccaggaagtcctgtgtgctgcttgcgacgcgcatcttggtcacatctttgatgatgggccacccccaactggtaaacgc

SEQ ID NO: 145 - DNA, 546 bp, Eucalyptus grandis
gaaagaagaagggttggtgatagaggagatagaataagaagggatggcgcagcttatggtggacaagtgcggggagggcttgctggtggcggtggaggcacagaaggcggtgccggcgccgttcctgacgaagacgtaccagctggtggatgacccctccaccgaccacatcgtctcgtggggagacgacgactccaccttcgtcgtgtggcgtccccccgagttcgcccgcgacctccttccgaactactttaagcacaataacttctccagcttcgtccgccagctcaacacctatggttttaggaagatagtaccagacaggtgggaattcgccaacgagttcttcaggaagggggagaagcatttactctgcgagattcaccgccgcaagaccgcccaaccacaactcacccaccaccacccgcactccgcctccccgcttagcggccccactccggccttcttccctttcccaagccgcctcagcatctctccctccgactccgacgaccagcattcctcccactggtgcgactcgccgcc

SEQ ID NO: 146 - DNA, 640 bp, Eucalyptus grandis
cgcggccgcgtcgacgaagaacacctcagaatcaacaccactccccaatttctctctctaagatcccacacccaaccgccaccctcaatctctctctttctctctcttcttcagtgtctgccatggctttggaggccctcagctcccccaccgctccctccgccccgttccaattcatgaaggactcctcccccgccgccgccgccgccgccgcctcctcctcctcctccgcctacgacctccccctcgccgagccctgggccaagcgcaagcgctccaagcgcccccacaacccgccctccgaggacgagtacctcgccctctgcctcatcatgctcgcccgcggcggcgccggccggaccctccccccgccgcctccccccgcggtctcttccgaggcggccaaggtggcctacaggtgccccgtctgcgacaagggcttcccctcctaccaggccctgggcggccacaaggccagccaccgcaagcacgcctcctccgccgcggccgccgccgggggtgacgaccagccgaccacctcgagcacctccgcggcgacgacctcctccggcgtctccgggaaggtccacgagtgctcgatctgccacaagagcttccccaccggccaggcgctcggcgg

SEQ ID NO: 147 - DNA, 236 bp, Eucalyptus grandis
atcagcagcagcagatggccgaggcaagagacgctcactcttcttgagatcagatctcgcctcgatcccaagttcaaggaggccaatcagaaaggacccttgtgggacgaagtctccaggataatgtctgaggaacatgggtacaatagaagcggcaagaagtgcagagagaagtttgaaaacctgtacaagtactacaagacaactaaggaaggcaaagctggaaggcaggatgg

SEQ ID NO: 148 - DNA, 520 bp, Eucalyptus grandis
ccggagccccagaggaagttcgacacttgtcatcgcccagcgcgactcgcagattcggttcgatctcggaggggaaatccaacttgcccgaaatagcaatcgcagcttgcagaatgggtcctcaaatgaacttccgaaacttggccgatgtgccagcagccgaaagaagcaccggagggcaaccaggaattcccctattatctcgacaatcctcagtatattccttgactttcaatgagtttcagaacacatggagtggactttctaaggatattggatccatcaacatggatgagttcctgaagaacatatggacagctgaggagagccaactacagctacaagacatggcgccttctggtaatggaggggaaggaggtggtcaagtagggaatttgctgagacaggggtcattgactctgtcgcggactattagtcaaaaaacagttgatgaagtgtggagagaattattcaaagagacggaggatgtgaaagaagggagtagagaaggaggtgacat

SEQ ID NO: 149 - DNA, 148 bp, Eucalyptus grandis
gacttcgagcggaaccgggcggagggggtcgactcggcccggttcgcggagctgatgatatcgtccggcctactgtgcaacgacgcggtcatctgggtcaccttccacagcgcctacgacttcgggtacctggtcaagatcctgaccc

SEQ ID NO: 150 - DNA, 443 bp, Eucalyptus grandis
cacaacacccccatatcagtaaacacttctcgctgctccagccagcttctgtctcatataaacactagccccacctcactcattatccgcttcgctcctactcaactgctatcgcgctatcccagcgcagacgtcctcccatgaacttctccgacaaggaagtgcagctcgcgtccgaccacccgaagaagcccgccgggagaaagaagttccgggagacccgccaccccgtgtaccgcggggtgcgtctgcgcgactcgggcaagtgggtctgcgaggttcgcgagcccaaaaagaagtcgaggatctggctcggcaccttccctactgtggagatggcagcgagggcgcatgacgtggcagcgctcgcgctgagaggccagtctgcctgcctcaacttcgcagactctgcgtggcggctgcccaagccggcatcgacggat

SEQ ID NO: 151 - DNA, 341 bp, Eucalyptus grandis
ggcatggacagtaggacttcgagtcgcatctctggggtgactcttcaggaggtcccgccaacttctagccaggttcctgagattccaccagctttgggggcctcagcaaatgatccctcatctgccgtatctgaactaaaggctccgtcacagggtactgctaaggtcactactaaccagtttccagatatgggtatgctcgcaggagcacaggagtctgaagcagtctccgttaatcaggcagataccgttatgactgggatctctcaaacacaagacatggtgctggaggatattgctaatatatccagagatgactacatgggagcagatctgcataa

SEQ ID NO: 152 - DNA, 603 bp, Eucalyptus grandis
gaaaagcgtacgcgaggaggcagcatgcgtggctcaccggagctaatgaggttgatagcaagactttttcgagagctattcttgcaaagagtgctcgtattcagaccgtggtttgcatccctcttctagacggcgtagtggaatttggcaccacggaaagggttcaagaggacatttcactcgtcaatcatgtcaaaaccttcttcgttgaccaccacccccctcacccaccgaaacccgccctttccgaacactcgacctccaaccccgccgccacctcgtccggccaccaccgcttccactccccgcccgtcccctcctacgccccggccgatccacccgctgcagccaaccaaggggatgaggaggaagaggacgacgacgacgacgaggaggagggagagtccgactccgaggccgagaccggccggcagggggcggcggcggcagcgcagaaccctcacggcgcagggcccgcaaacaacgccgagcccagtgagttcgagatgtctgaggacatccggctcggctcgccagacgacgggtcaaacaacctggactcggacttccccatgctgaccataaactcgacggccgcggatc

SEQ ID NO: 153 - DNA, 984 bp, Eucalyptus grandis
gggatgggtcctgtagggagccgaaagatggagaagaatccgaagcgactcgaatccttaatttgagactcgaggacgagggccagcagaggatgaggaaacgggtgctggacaagttgcacaccgtctttggtgggtcggatgaggacaattatgctctcggcttggaccgggtgacggacatggagatgttctttctggcgtccatgtacttcttgtttccctcgggagaagggggtccaggcaaatgttttgcctcggagaagcatgtatggctgacagatgcactcaagtcgtcttctgattattgcgttcggtcatttcttgcaaagtctgcagggattcggacaatagttttggttccgactgacgttggggttgtagagttgggttcggttagatctgtcccggaaagctcggagctggtgcagaccataagattgtctttctcgacgaattcatttatgtcggttaagccaatagctgccttacccatgacgaatgaaaagaaggacgaaaacgcacccttctctaatttggcgttggcaggtaagggtgaggcaatctccaagatatttggtaaggagttaaccacagttaacagtcctggccattatagggagaaacttgccgttagaaagatggactccaggcaatcgtgggaacctcaccataacggaagtaaactcccattttcaactcctagaaatggcacccaagacacgagttgggctcatcatgctcatggcgtaaagcagttgagtcctgtggaattttatggctctcaaacctcagccagtaaattagaggagcggatgaacagcggtaggaatgattttggattgaaccgctacccaacaccaaagcaggtgcaaatgcaaatcgactttacaggtgccacttcaaggccttctgtgataacccgaccattcactgccgactctgagcattctgatgttgaagcttcatgcaaggaagagcagg

SEQ ID NO: 154 - DNA, 1144 bp, Eucalyptus grandis
ccgaactggactcccatctccggcgagtgaaacgatcgaggaggaggaggaagaagcgacgatgatgatgatgacgatggccgccggcggcggcgaccaccacgcccgctccaccccgaccgtccagatcccccccgtgtgggacccgctcgacgacccggccaccggcggctgcggcgggccgtactcaccgtactccccgtactccccgtactccggcggcggcaatgccggcggggccgcgggaggaggggagtgctgcaacgacctgacggcgttgcggcggttcctgccgtcgaaccaccaccaggacgaggaggacgaggaggacgggcgggcgcccggggaggacggcgtgctgggctgcgacgagttccggatgtacgagttcaaggtgaggaagtgcgcgcgcgggaggtcgcacgactggacagagtgcccgtacgcgcaccccggcgagaaggcgcgacgcagggacccgcgccggttcttctactccggcactgcatgtcctgatttccgcaaaggcgcgtgcaagaagggtgacacgtgcgagttcgctcacggcgtgttcgagtgctggctccacccggagcgataccggacgcaggcgtgcaaggacgggcaaagctgccgccgccgcgtctgcttcttcgcccactcccccgaccagctccgggtcctccccgcccaccagcagcagcagcagcagcagcagcagcagcagcacagtcccaagagcgccaccgactccgagttcgggtccccggtccgcccctccgctgccgcggcggcggccttcgactcctacttcaccaagccgtggtcggcctccttcatatcctcgcccacctcgatcctgaccacctcgtcgcccccgatctcgcccccgaccaactcgcccccgatgtccccgaaccaacgcggcggctgctgcgggtcgcccggatcggtgagcgagctggtggcctgcatgaggaatatgcagatcgccaagatgaagatgagcccccgcgggcagatgggggggtctctcttcgggtccccgctccgacccgggtgccaccttgcggcgccggtgactcccagggccgagtcttcaccgcggtacgggcaactcggcggtggaggtggaggcgggctc

SEQ ID NO: 155 - DNA, 238 bp, Eucalyptus grandis
tattgataagatggcggaagcaccggcgagtccgatgggcggtgggagccacgagagcggcggcgagcagagcccgcagttcgggcggcgtgagggagcaggataggtacctgccgatcgcgaacatcagccgcatcatgaagaaggcgctgccggccaatgggaagatcgccaaggacgccaaggacactgtccaggagtgcgtctccgagtttatcagcttcataaccagcgaggc

SEQ ID NO: 156 - DNA, 950 bp, Eucalyptus grandis
gacgcttccctcctcccccatcccggccatggcgacccccgacgaacgcccctcctcctcctcctccgccgcctccgccgtcgccatccgccaggtctgggcctggaacctcgacgccgagttcggcctcatccgcgacctcatcgaccgctaccccttcgtctccatggacaccgagttccccggcctcgtcttccgccgccccgccggcgccggcgccggcgcccgcccctccccctccgaccactaccgcctcctcaagtccaacgtcgacgccctctccctcatccaggtcggcctcaccctctccgacgcccgcggcggcctccccgggttcatctgggagttcaacttccgggagttcgacgccgcccgcgacccccacgcgcccgactccatcgagctcctccgccgccagggcgtcgacttcgaccgcaaccgcgccgaggggatcgactccgcccgcttcgccgagctggtgatgtcgtccggcctcgtctgcaacgacgccgtcagctgggtcacgttccacagcgcctacgacttcgggtacctggtcaaggccctcacccgccgcgagctccccggcgacctcccggagttcctcgccgtcgtgcgggtgttcttcggggaccgggtgtacgacgtgaagcacctcatgcggttctgccacagcctgcacggcgggctggaccgggtcgccgccgccctggagctggaccgggcggtcggcaagtgccaccaggccggttccgacagcttgctgacgtggcaagcgttcaggaagattagggacgtctacttcgccaacgacgacgggccggagaagcacgccggcgtgttgtacggcctagaggtctattaggatcaatccccaaaattcaattcattcttttgtaccgtaccaaatttgtgggtacattttgtgaatattgttcggtatcttattc

SEQ ID NO: 157 - DNA, 272 bp, Eucalyptus grandis
gtcctgtctggaggtcttctgagctgagagatttaaaaggtctgtaaaagattcaaggtttcttctacccagaggaaagaacctacttcttcctttatcacccatgggttcttaaacctcgtgacagtgcaatttaaacattagagcaaaacataaaaaaagaagagagctgttcaaatggctactggcgtagaaggcaatgaaggtgtcccagcaaacctgagaaagcagcttgctgtggctgtgaggagtatccaatggagctacgcaat

SEQ ID NO: 158 - DNA, 863 bp, Eucalyptus grandis
ttctactccaccttcatctcacaataaaaaccagcagtccagcacgagcacattatccacttccactccagaactcaagcgcagacgtactccaatgaaccacttcttctcttcttactccgatcccagctcctgcagcctcgactttgctgaagcgtcgtcctcctcgtcgccgctgtccgatggcaggagtgctatggtgcccgggaacttttctgatgaggaggtgctcctggcgtcgcaccagccgaagaagcgcgccgggcggaagaagttccaggagacgcgccaccccgtgtaccgcggggtgcggcggcgaagctcgggcaagtgggtctgcgaggtccgcgagcccaacaagaagtcgaggatctggctgggcaccttccccaccgcggagatggctgcgagggcgcacgacgtggcggcgctcgcgctgaggggccggtccgcctgcctcaacttcgcggactccgcgtggcggctgcccgcgccggcgtcggcggacgcaaaggacatacagcaggcggcggcccaggctgcggaggcgttccggccggcggagtccgaggctgaggacgtgatgtcggggtacgagaagaagtcgccttcggaggagggaatgctgtacgacgacgaggacgtcttcgggatgccggggttactcacgaatatggcggaggggatgctcttgcctccaccacaatgcggcggagatgggtacggcggagaggacgacgggaatctggatgcatacgtgtcgttatggaactattccatgtagtcatttctcaatttcagttgtactttttgtggttagggacgactgggatgccgactaaaatatttttgaatggagtgcg

SEQ ID NO: 159 - DNA, 936 bp, Eucalyptus grandis
gggtggcttaggcttactatagagagggataggagagagagagacaggagagagagggacaggagagactttgttgttgttgttgctgctgttgttgtggtggagtgtggaggaaggaggaaggaagggaggagaaggtctcaagaggggagacatgttcagcttgatcccaacagttccattctttgcttcttccctcctgaccagatccttcaccagctgatatctgaatgagctgaggagagttcatttcttgttcactgtctacttgaatttggatcactttgtaaattgctggaattagatgcctataagaatccagaacttgccaaagaaaaatttcgatcaaggttcgagcctttcgatgcctcatgtcggggtgacttacccaccatggtggagcctgaatgaacagcaacttccgcaatctttacccaaaaatagtggcttgaaagcggaatctccacccatgctccatcatcaagcaaagcatttaggtcttcaactacaagaacaggaatcgtcttcaactcaatcggctggcaattcttgccatgaagtgagcgtcgtgggtggggccaactctcaagatcaaagcatttcatctgaatctggtcaagatgaaagttgtggcaggagctttgagggccagacaaagccaattttcatgttcaacaatccggagattgtcttcaattcttcactagctgatcaaaatcaacctctgattcgtgttccatatccaccagtcgatccttattacggtgggcttctgactgcatacagaccacaggctattattcaatcccaggtaggatctcaaatgttcgggatggcacctggacgtgttccattgccacttaaccttgcagaccatggaccaatctacgtcaatgcaaaacaatattcacggaattcttcggaggaggcagtcac

SEQ ID NO: 160 - DNA, 281 bp, Eucalyptus grandis
agggctatgggtttgttaggttcggcgatgagactgagcagttacgggccatgaccgaaatgaatggcatgtattgttcttctcgccccatgaggattgggcccgctgctaacaaaaagcctattgctacccagcaatatcagagtgcatcttaccagaacagtcaaggaaaccaaggggagaatgatccaaataatacaactatatttgtcgggggtctggatccaagtgtatcagatgaccttttgaggcaagtattcagtcaatatggagagttgcat

SEQ ID NO: 161 - DNA, 291 bp, Eucalyptus grandis
ggatacagaagaagtgccaagaaatgcaaggagaagttcgagaacgtccacaagtactataagaggaccaaggaaggccgtgctggtcgtcaagacggcaagacctacaagttcttctccgagctcgaagccctccacaacaccgccgccggggccaccgtcggaatatcaagcagcttcaagtggtggtggtgctgcttctggcactgcagccctgggcggtctctcggtacccccagtttcgatcgggatatcgttcgccaaccccgtcccaatctccactgtccgcgg

SEQ ID NO: 162 - DNA, 743 bp, Eucalyptus grandis
cctctttcccctcagcgaatggagatggaagatcaccaccagtacaccgcggcagatttgcggcacctcatcaacgcccgtccacctccacccccaccgcacatccagtcgatctccccgcctgagctattctgcggcggcggcggccaccggaacccgacgcagcacttggagtcgatgatgatgggtggcggcgggcttcacaacggccaacgccaaggccacagccacaaccatcaacaccaccaccagtttggccgtgatcattcttctccctcttcggtcgccatggctggtgcggcagggggtttagagagtgagaacggcggaaatgggagatggcctaggcaggagactctcacgctcctcgagatcaggtcgaggctcgactctaggtttaaggaggccaaccaaaagggtcctctttgggacgaagtttcaaggattatgtcggaagaacatgggtatcaacggagcggcaagaaatgcagggaaaaattcgagaacttgtacaagtattacaagaagacgaaggaaggaaaagcgggtaggcaagacggtaagcactacaggttctttcgtcagctcgaagctctctacggagagaacgccaattcgaattccatcctccaagctccatctcttccacactcactccactttcatcctccacccaacatcaatgatattaaccaagatgcgtctcatcatcgtcatcctcatcaactgcagagaccgtgcga

SEQ ID NO: 163 - DNA, 394 bp, Eucalyptus grandis
ctcaaatacacaccgacaaaaaaacaagcattgtcagaatgtcaattccaaactgattttttcggcacgagcgagtctgaatggaacgcggcgatccgaacgttgtcgccgtcgccaggctgaggagggaagactgcgaacgaaccaagcacgactccgcgttcgccacttggaaggtgctcgtaggacctactgattgggaagattattcattggggaaggaaggtgctgccaggtaccgggttcataacctcccgaaaagcccggggccggggatatatgagctcggcgtagccgcttctcatgccaaattgggtcgtgagatcgccaagctcgacccgcgatatatagtcgtggtttaccttgggaaggcggactgtgtcaggaccagact

SEQ ID NO: 164 - DNA, 1017 bp, Eucalyptus grandis
cacctctttgctctttcttccacacggtcaccactttcccctgcaactccccccttctctaaagcccttgcgtgcgagagatattccatggattagggctttccagaaagtaaaacaacctccctcagctcctcttcaccactggtttttgagatgatctgtgtgctcggcgccgttgattattatgtcttattctgacttgctgaacctgctgtttgccgtgggcgtttggtgcaccgcgtatattgcggctgccgttctcgagtcgctccgggtcttccatactctctgttcgttttgatttcgatagctgttttcgaaggctaagatgggctacgcacagctggtcatcggccctgccggcagtggcaagtcgacttattgctcgagtttgtatcaacattgtgaagctattgggcggacaatacacattgttaacctagatcctgcagcagagaactttgactatcctgtggccatggatatcagagaactcatttcattggatgatgttatggaggaacttggactaggcccaaatggtggcctcatgtactgcatggaacatcttgaggaaaacctggatgattggctcactgaggagctggataactatttggacgatgattacttagtattcgactgcccaggccagatagaacttttctcacatgtgccagtgcttcgaaattttgtggagcatttacagcgtaagaacttcaatgtctgtggggtatacttgcttgattcacagttcatcacagatgtgaccaaatttatcagtggatgcatggcatctctctctgccatggttcaactcgaattgccccatgtaaatatcctgtcaaaaatggaccttgtgaaaaacaagagagatattgatgattacttgaatccggaacctcgagtgttgttgtcagagttgaaccaaacaatggctcctaagtttgagaagctcaataaagctttggcagaactggtggatgaatatagcatggtgagcttcatacctctcga

SEQ ID NO: 165 - DNA, 376 bp, Eucalyptus grandis
tatccaaccattatttatcgtccctacagttttatggccaaaatcagcgccgtggagcgcggacattttctgacggtgatcccgcattttgcctggcgactggtgaatccggcaacgctgaaatattttgatgcaccgcacaggccgatgtatatgcaggaatatctttattcaatcagaaatcatcgttataccgccacgatgcttcagcatattgctgaagatcgtgacgggacgagtcattaacccagcatcgagccggttgcaattaaattacggtgtaagtcgaagacgtggctaagatcgtggtgaatatgtccgccaggcgcattttccagatagcgatgcagataatcccgatacataggatgtgcac

SEQ ID NO: 166 - DNA, 689 bp, Eucalyptus grandis
aaatagaagaagaagaagaagaagaagaggatgatgatgacgattgatgaggtaagagacgtcactggtcaatggtcatgcgctgaagctttctacctttaatgcaagcatcgatcgtctcggcgacgtgctctgcttcctcttcactgctggtcagttcatatgcatccacgcgtagttgtcttcaagcgacgcatgcactgattgaagcgtcctcataggcttgtgagatgatccaagacctttcactgcttgtgatactctttataaaggacgagggatggtcttgatgaatcagcccatctagagaggcttccaccatatcacagtttggacttgtgccaatgccaaaaggttcaagcataaagatgggagttccactgcaacattctagtggtatcaaacaattgaatgttcattttcaagagcgggacttgtgttctactcaatcaaccagtcaatcattcagtgaagtgcctaatataggaggaagtactgactgtagccaagccacagttttagaacagacagaacatggtgaaactgaagggcaatcagtgagaggacaagcaaaatcagccttgtcaatgggaactcaggatttagtcttccaacctttagaggtgtgcatcccactccactatgctgaaccatccttgggtggttttatgcccgctgcttatgggcca

SEQ ID NO: 167 - DNA, 1566 bp, Eucalyptus grandis
tatctctagcttagcttggagcttacctactgtactctgcttttcccccccctctctctctctctctcgctctgaacgtttttcagtcatcgagccgagctgaactcctctccccctctctctctctctctctgggtgacccttcttcccttttctctgcgcttccgtcgaagtgaaagagggcgccgaggttgtcgtccgagatgcgtcggagaaggacctctctcctgatttcatgagaccgaccaccacactatgaaagatctaagtttgaggcaatgggaagtggtgtctacacctggcaatgaaggaaagacagcgttggagagctgaagaggacgccttgttacgtgcatatgtgaaacagtatggcccaagggagtggcaccttgtgtctcagcgcatgaacactccccttaaccgtgatgccaagtcctgcttagagaggtggaagaactacctgaaaccaggtataaagaagggatccctcagtgaggaagaacagcgtcttgtcatccagcttcaggcgaaacacggcaacaaatggaagaaaattgctgctgagatcccgggccgtacggctaagagattggggaagtggtgggaggtatttaaagagaaacagcaaagggagcaaaaggagaacaaaggtgctttaccaattgacgaggggaaatacgatcatatattagaaaacttcgccgagaagctagtgaaggagcgatcgaccccagcacttctcatggccacagcaaatggtggcttcattcacaccgattcacctgctcttgctccaactcttctacctccatggctttcaaattctaatggcaccccaactctgaggcctccttcaccgtcagtaacccttagtctctcccctgcaacagttccagcatctcaaccgattccgtggctgcaggcagatagaggactcgatagtggttctctctcactgactggtttgcccaaccatggtccactccctacttcaggagaaaatatcttaatgtctgagcttgcagagtgctgcaaggaattggaagaagggcaccgtgcttgggctgcacacaagaaggaagcggcatggaggttgaaacgactggagttgcagttggagtcggagaaggcgtgcaggaggagggagaaaatggaagagatagaggcgaaaatcaacactctcagggaagagcagaaagcttctttggataagattgaaacagaatacagagagcagctggcaggattgaggaaagatgcagaatccaaggagcagaagctggctgaacagtggacggcgaagcatgttcagctctctaagttaatcgagcaaatcgggtttagaccccggattgcagatcatgacaggcagtgagagttaccgtgagtcgtagtcctttatatacacgtctctttcttgtgccaatcatgtcattcaagtctgcttattagaattccaagactcccttttcctacccaacaaacacctacctttacgtatatctcaataacattacagagcttctcatcctcagctaagtcctctgagacattttgtatggaaat

SEQ ID NO: 168 - DNA, 381 bp, Eucalyptus grandis
agggtctggattcctgttcggtcgaggagctccaacaaacagaaaaccagttggaaagaagtctaaccaagatcagggcaagaaagaaccatttaattagggagcatattgagcggctaaaagcagaggagcggaaactactggaagaaaagagaaagctacttcaagagattgaatgcggcaaaggattgaccccggtctccagcgaaccgcctcgtgaagaaatccgcgcggagtctatggatgttgagaccgagttgtttatagggccaccgaaaagatgaaccgctcagttgcccgttctgcgattgctcaaaataatgaccatagcaacggaaacgcttcttctgctgctcttttcttcttcaatcgtgaggcaag

SEQ ID NO: 169 - DNA, 331 bp, Eucalyptus grandis
ggaggatccagtgggtcggcccgagagtgccagtgagattagccaagagccgggtcaagagtttatggatgaagacgagctcttgaacatgccgaaactgctggacgacatggcggaaggaatgctggtgagcccaccgaggactcagatggcctcagagaacgactcgccggaggactcagatggtggagagagcctgtggagttatccctaattttagaaggtgagatgatcagggcttatcaattacagtagtcctcattgtagacatatacgaatacgatatccattgtatatgatcaggatttcgtcatgatggttgatcgcatcc

SEQ ID NO: 170 - DNA, 950 bp, Eucalyptus grandis
ctggtttcgactcatctctctctctctctctctctctctctctctgatgagctttctctcccttggtgcgtgatgtgtggaggcgccatcatttccgacttcgtcgaggagcggctcgaccgccgccgccccgggagctgccgccccgagaggaagctgacccctcacgagctctggtccgagctcgaccccgcctccgacctcctcagcctcgacggccccgtggcccaaggccaccccaaccctttctctctcgtcgcaaaccaactcaaccaagtgatgaagagtgaagagaagaacagtgaggaggcgggtcacggacacgtgtcggagacccagaagagccagagcaatggccggagccagagggctcgcaagaacgtgtacagagggatccggcagaggccgtggggcaagtgggccgccgagatcagggacccccacaagggcgtccgcgtctggctcggcaccttcaagaccgccgaggaggcggcgcgggcctacgacgaagccgccaagcgcatccgcggcgacaaggccaagctcaacttctccggccccccggccccggcccagccgtcagctaagaagaggtgcgtggctcctgacgagccgaaggatgaggccggagctgcaggatgtgagctgaaggagcggatcgccagcttggaatctttcctggagctggagccaaccgaggagccgctcgagccgggcaccgggccgtccccggctgatctctggatgctcgaagacctcgtcactcatcaccagcaccgtttcgataaccagcttgtttattagataataactgagtttgatcactgatcatggtactttaaactcgtgttctagctttgggatgcttaactatgccatgttttagacgtgtaagaaccgttgtgctttcgagtgccattaatacagtaccaagtatcgtaaaaaaaaaa

SEQ ID NO: 171 - DNA, 376 bp, Eucalyptus grandis
ccagcagaggctgctgcagtactggagtgacgcgctgaatctcagcccgagggggaggatgatgatgatgaatcggttggggcccgacggcaggccgatcttccggcctccgcagccgataaacaccacgaagctctatcgtggagtgaggcagcggcattggggcaagtgggttgcagagattcgcttgccgaggaaccgaacccgactctggctcggaaccttcgacacagccgaggatgcagccctggcctatgaccgcgaggcgttcaagctacgaggggagaatgccaggctcaatttccccgagcttttcctcaacaaggacaaggctgaggaatccgctggtccaagctcgtcatcttcgtcacccccc

SEQ ID NO: 172 - DNA, 427 bp, Eucalyptus grandis
tgtccataccctctgtgggacttctggttcaatataaactcctcaacccagcttcctcctattcttcatgcatcatgatccaagatatgtcacagggttttaggaagattgatactgatcgatgggagtttgcaaaccgaggttttcaggaagggaagaagcacttgctgaagaacataaggaggagacgcaaactcagcgatcataggacaacatcgagtagtaccgttgcttcggattacccagaggctggaaaggaagctgaacttgaaatgcttaagagggaccaggaagcgttgaaggccgagatcctgaaactaagagaagagcgggagaactcgcagcatgagatcaaccaggtcatcgagcggtttcgctatgccgagtgcaggtgtcggcggatgttcctcttcctctccaaagcagc

SEQ ID NO: 173 - DNA, 607 bp, Eucalyptus grandis
gaaacaccttttgaataacatctaccgacgcaaaccaatccatagccattcggggcagggtgctcggttatctgattcggagaaacagatgtacgaggaggaaatcaagagactgcgacacgagaagagctcgcttcagttggagcttcaaagatatcagggagataatcaggatgttgatttccagatacagttactacgtaagcaattccaaaatatggaacaaaaacagacgcacttgatcaccgtcttagctcaattaatgcagaagccagtatttgcttctctttttacgcagcagtcggatagccctaccaaaaagagaaggttggcggaactggatcatttacatgactcagatgacaagagtgggctagagagtttgaaattccagaaagaaaaattcaatggtgttcccttttctctactagatttggactccgttgagaaactggagcagtctttgcactttttagaaaatctccttcaaggagtcgataacacttcaggcgcagaacagcacgacttcggagcaatatcgttgccttggccggcgggtttcaccgagagaaaggaatctttggatgattctgacaggcatatccac

SEQ ID NO: 174 - DNA, 719 bp, Eucalyptus grandis
atcggattgacttgcctttgaattcctcctcctccggggaaaattccacaccgaacttccgctttgggggggccgccggaaatctagggctccgctccgccgtcctcctccgtcgtccgcaggtccatctcggtttcaaatgctgttatatttttgatccaacatattgtcggagagcaatagaatctggcgttatgcagccaaaatctaaaatttcaaacggggtagatgctcatccacatagcatccagactagtgcagtattcactgaaccctggtggcgtggctataatactatttccccagctgacccaggaagaaacgaaacccatgcgcctttaggatgcataaatggtggttcagagtccaatggtggtcaatcacagtcaaatgaggaaagggttgaggaagatgatgatgacgataatgtcaaaggatcagggaaccctgcatgttcaggagcagttggaaatcaaggacaagggcctcaaaacgggcatggtgctcccactattattacaatgcgtgatgatggccttgcacaacctccccagctagagcttgttggtcacacaatcgcatgtgcatctaatccttatcaagatccatattatggggggttgatggcacaatatgggcatcagtcaatggcttatccttttgtcggtattcctcatgctaggatgcctctgccccttgacctggcacaagaaccttgt

SEQ ID NO: 175 - DNA, 570 bp, Eucalyptus grandis
actggggccaatgagaaggattctgtgatggaaattacatttcacgtgcccaactccaacacccaatttgttggtgatgaaaatcgtcctcctgctcaggttttccgtgacagaatcatgtcagtggcagatgttggggctggaggtgaagatgctgttgttacatttgagggaattgccattcttactccaaggggtcgctacagtgttgaacttcatctgtcattcttgcgacttcaaggacaggcaaatgactttaaaattcagtacagcagtgttgttcgcttatttttgctgccaaagtctaaccaaccacatacatttgttatcatcactcttgatccaccaattcgcaaagggcaaactttgtatccgcacattgtgatgcagtttgaaaccgactatgtggttcaaagcacattgtctatgaatgatgatttatttaacaccaagtacaaggacaagctggaaccatcttataagggactcattcatgaagtgttcaccaccatcttgcggggtttatccggtgccaaagtcacgaaaccaggaaaattccgtagttctcaa

SEQ ID NO: 176 - DNA, 754 bp, Eucalyptus grandis
cttgaaacaagtggtaatcgcctggcaagggcaatctctgatgccgatacttctagtgcagcagctctaatggatatgctggagcaaatggtgtcggttatgggcgacccaattcagcgtcttggtgcttacctcttggaagggcttagggcgaaattgaaattttccgggagcataatttaccgaaagctcaagtgcgaagaacctacgagctcagaattgctgactaacatgcaggttctctatcagatctgcccctactggaagtttgcatatgtgtccacaaatgtcatcatcaccaaagccatggaaaacgaacagagaattcacattgtcgatttccagattacacagggcagccagtgggtcactttcatccaggccctcgcacagaggcctggtggcccccccctcctccgcatcactggcatcgacgattctgattcagttcatgctcgtggggcgggactggagattgtagggcagaagctttcggaaatcgcagagtcatgtaacgtgccgttcgagttccatgatgcagccgtttctttatctgaggttgagctacagaatcttatgattcggcctggggacgctttggcagtgaactgtccttacatattgcatcacatacccgatgagagtgtgagcactcagaatcaccgagaccgggtgttgagactgatcaagagtttgtcgccgagagtggtgaccctcgtggagcaagaatccaacaccaacacatcctcattct

SEQ ID NO: 177 - DNA, 525 bp, Eucalyptus grandis
ggaaattgggatgaacctacgaaggaagaagttaatgaaccagctgatatagctgaagcaaagactgtcagtgattcagaggaagcaaaacctaatgctaagagaaaacagcctgagaaggaagcttctgagaaggaagcttcaaagaaggaaccaaacaaaccacccaatagttggtttgatttgaaggttaacacacatgtgtatgtaactgggttgcctgaggatgtcactatggaggaagtggtggaggttttttccaagtgtggaatattaaaggaggatcctgaaacaaaaaagcctcgtgtgaagatctatgttgacaaagaaactggaagaaaaaagggagatgcacttgtcacttatttaaaggagccctcagttgccctagctatccaaatattggatggagcaccttttcgccctggtggcaaggtaccgatgtcggttagccaagctaagtttgagcagaaaggtgataaatttatttctaaacaagtggacggcaagaagaaaagaaactga

SEQ ID NO: 178 - DNA, 978 bp, Eucalyptus grandis
ggccatgatgaaaacggtcatggactggaaaatggcttcacgccagtagttgagagcgatgctgaacacacttagccagaagatgttcaaaggcaaaccttcttctctcagaggctaaaagatgttccacccatggcttcttaatctgatccagatgaaccatggagaaacaaaatcgaagtctcatcaaaagggtatttgggaaggaggcattatacaaaatcattgcattggtttgctactgcagggacataaatgctgtggttatattatttagcatgcgccgtttctctgtaattacgagctgccttttgttcatgctagacttttgaacaactgcttttgcctttcctatatgaactacagatcctgattgacctaagtaatgacaaggcaaccgttcttacggacaaaatccaggtgctgaaggatttaactacggaagttaacaaattgaaagctgaatgtgcagctcttattgaagaatctcgtgaggagaagaatgagctcagagaagagaaatcatctttaaaatctgaggttgaaaatcttaatgtccagtaccagcaaaggacgagggttatgtacccttgggctgccatggatccatccgtcgtcatgggtccagcctactcatatccaggtccaatacccgtcactccaggtccaatacccatgctctcacaacttcagcctttccctttctttggaaatcagaatgcaagtgctattcctgctccgtgttctacctttatcccaaattcaatgcctgccaatcccacatttgaacagcagtcaacccaatatgcttccacttctcacgtgtcaaataaaaaagactccaaaagcaggtcttcagatcatcaaaggggcagcattgcagagcaagacgaagattcaaataacgtggcaacagaccttgaacttaagatgcctggaacatcatcacatcaggacttgacgtccggagaaaagaag

SEQ ID NO: 179 - DNA, 566 bp, Eucalyptus grandis
catcctatgaagccggaatctgttgaagtactgaatttcggagatagtgggagcggaaggttgctttcgagtcattcacaggtcgcagttgcagaggagcctctgaaccacgtcgaggcggagaggcagaggagggagaagcttaatcagaggttttacgccctcagggccgtggttccaaatgtatcaaagatggataaggcttcactgctccaagatgcggagtcttatatcagggagcttaacatgaacctacaagctgcagagtctgataaggaggatttgaagaagcagttggatgaactaaagaagcgatcatcggataaagaatgtatcccggtggatcaagatcgcaagatggcaaaacctacgggaagtaggtccactggggtggcaatcgatgtgaagataatgggttgggatgcagtggttcgagtagagagcggccggaaggatcatcctgcagcaaggttaatggtggctcttcaagaattgaacttggagttgcagcatgctagtgtttctgtggtgaacgagctcatgatccagcaagccacagttaagat

SEQ ID NO: 180 - DNA, 521 bp, Eucalyptus grandis
gcaacttttcgagctccgtcaggaggaaaaaaaaataataaaaaaaagagatgatgctcggagagcctcaccgtcctcctaatccgacgatcgacgttcctccctggccgatcctggacgatccgacggacgacgccgtgcctcactctccgtactccccttacacgctcaatgctggctacggcggcggctgcgactcctctccctccgccgccggccccggccacttccaggacgtcatggcggcgctccggcggttcctgccgtcgaaccgccccgacacggacccggacccggatatgacgtcctcccgcgaggcggacttccccatggacgtctactcctgcgacaacttccgcatgtacgagttcaaggtgaggcggtgcgcgcgggggcggtcgcacgactggacggagtgcccgtacgcccatcccggcgagaaggcccgccggcgggacccgcggaagtaccactactccggcaccgcgtgcccggagttccggaaggggagctgccggaag

SEQ ID NO: 181 - DNA, 449 bp, Eucalyptus grandis
ccgacgagccctccacctccgccaccaactccggcggcggggcggccgccgcgagctcgagcgggggcgggaggtcgcacgagtgctccatatgccacaagtccttccccaccggccaggccctgggcgggcacaagcgttgccactacgatggcggcgccagcggctccgccaacagcggggtcaccacgtccgagggcgtggggtccgcggccccgcccgcgctcggatacgacagcggccgccgcaacttcgacctgaacgtgcccgcgctgccggagttcccgaccgggttcatcgtgtcgggcgacgacgaggtggagagcccccacccctcgaagaagccgcgcttctcgacgcccctgaagatcaagctctctccagaacagtgaaatctttgcctgtgcttttaggattagcgcttgttaattgatttagctagggctttt

SEQ ID NO: 182 - DNA, 610 bp, Eucalyptus grandis
ctctctcttctttctctctcttctgcgtgcgcgatcgccattgaagaagctctgcgcgagacctcggaaggcggaggaggaatccccccacgcgatttcgcatccgccgccgccgccgccggccgccgctttccgttcttattgcaattctcaagatagatccatggcattcgagcagtactttgcccaggagtggaggcccatccctggaccagctatggattctggaagtagcgatggctgtttcgactgcaacatctgtctagactttgcgattgagcctgtggtcactctctgtggtcacctctactgctggccctgcatctacaaatggctccacgtgcaaagcgcctcgcttgcttctgatgagcacccacagtgtcccgtctgcaaggctgaaatatcccacacagccatggtccctctctatggccgtggccaaagctccaaagagtctgatctgcaagacaaggcactccaactaggaacaattgtacccccgagaccagcggcttgtggcatccaagctctcgcctctacaacaccccgcagcggtcagcagctcccctaccgtaatccttaccaaaatccgtactacagcgccaattcg

SEQ ID NO: 183 - DNA, 767 bp, Eucalyptus grandis
cccgactcagcaagcaaaagaagaaaccagaaaaatcagacaccccgatttcacattctctactacagacttccagagatggtgaagagagacagagaggacacggaggtcgaagccctggccagggccaattgcttgatgctcctctcccgagttggcgagagcaccgactcggcgtcgccggaccgcaaatcgcggcctaccgagcgaatgttcgcgtgcaagacttgcaaccgcgagttctcctcgttccaggcgctcggagggcacaaagccagccacaagaagccgaagctgatctccggcgacctcttccacctcggccacgcagcagattcctcgccggccaagccgaagacgcacgagtgctcgatatgcggcctcgatttcccgatgggccaagccctcggcggtcacatgaggaggcacagggcggccatgctggaaagcttggcagcagcagccgcaaagcctgtgccagtgttgaagaaatcaaacagcaagagagtcacgggcttggatttgaactcgttgccgatggaggacgacttgaccttgcgcttaggaaaggttgcgccgccattggtgctagatctcgttttgtaggagcttagagagcgtagattgtgtacaaagcagtttttagtcggtgcctggccatttctttttctttttttttccttcttttttgaattcattgattgatattttgaatcagagactgggtttcgcatggatattaatttgtttccaaaaaaaaaaaaaaa

SEQ ID NO: 184 - DNA, 469 bp, Eucalyptus grandis
catgacccgacgccgccggcgaacgactgggtcatggagaccaggaagaaccactcggtgtcggcggcgtcgggttgcccggtcgggcctacttcagctcgaatcccgcgtgggtcacgggggccgagaggttggggaattgcgggtgcgatagggcccggcaggcgcagatcttcgggttgcagaccatcgcgtgcgtccctgttttgaacggtgtggtcgaactgggttccaccgagccgatctaccagagctccgatctgattagcggaattagggggctgttcaatttccatgaatcggagatgggatgcggtggtagggttttgaatagcgagcatgacccggcgtcgctttggatctgcgatccgccagtcacgatggagattaacgatcgtcctatgacatttcagatagagaaccccagctcgagcagtcttaccgaaagccccagcgcgatctgcgcgat

SEQ ID NO: 185 - DNA, 533 bp, Eucalyptus grandis
gccttggcacgcaaattccatcgggaatccatatgccttctgcgaatcttagttccatatcgatcttgggtcctattcccatggtatcgggggatggtggtgggaggaccggttctgagcggtcaagaaacgctgattgtgctccggcaggttttcctggaggtgatgaagatgtgaataagggaggggacattccttatggaatgtcaaccatcgtgagagtcattcccaattctaggtacttgagggtggcgcagcaactgcttgatgaaatagtgaatgtgcgaaaggctttgaagcgccctgatgacgcgaatgaccaatctagacatgagaaccaaaggagccccaaagatgcggatgggggttccaagaacgaagcatcctcaaatccccaagaatccgccagtaactctagcgagctttctgctgctgaaaaacaagatttgcagaacaagctcacgaagctcttgtccatgttggacgaggttgataaaaggtacaagcagtactatcaccaaatgcagatcgtg

SEQ ID NO: 186 - DNA, 413 bp, Eucalyptus grandis
ggacggctcaagaagacaggatcctcaccaactacatcaaggctcacggcgagggcaggtggaggaacctccccaagaaagcaggtccctagcgtttgccagtgtgtttttccttttgttttctgcctttgaatgagcttgtggagatagcgggagagatcgagactcgtccgggcggttcgattctcgagagataatcgtcgtcgttcgctagggaaacgaggtttcgtctgactacggatggaaattcctttttgcagggttgcagagatgtggcaagagttgcaggctgcgatggttgaactacctgaggcctgacatcaaaagaggcaacatatctcccgatgaggaagagctcatcatcaggcttcacaagcttttggggaacaggtgaaacttcttctgttctgacc

SEQ ID NO: 187 - DNA, 574 bp, Eucalyptus grandis
tcgaactttatcgcgatctcgccgccatctcgtgccagcctgcaccagatgcatcacccgccgaacccggattctctctcgctgcttcaatccgcgcgaaccccaaatgcacctccggagcatcccgttccctccacttccaggagggatgaagttgctgtgttgaaaagtcagaaggcaggccgtgagaaattgaggagggatcgactgaacgagcactttatcgagttgggaaatacgctagatcctgataggccaaaaaatgacaaagcgacaattttatcagatactgtacaactgctgaaggatttaactgctcaggtgaaccaactcaaagctgaatatagtacgttctgtgaagaatctcgtgagttgacacaggagaaaaatgatctcaaagaagaaaaggcctctctaaaatctgacatcgagagccttaatgctcagtatcagcagagagctagagccatgtttccatggcccattatggatcactcagtggttatggccccaccttcatacccatatccagtgcccgtagctgtgccttctggtcccattcctgttcatccac

SEQ ID NO: 188 - DNA, 988 bp, Eucalyptus grandis
gggcgccgtctggctagcgagggcgagctctcttatcttcttcttcctcctgctccacctaaaaccctcgcccggcaaaaccgattcgaggtcgagagtcgagtaaagatgaatgtggagaagcttatgaagatggcgggttcagtccgcactggtggaaagggtaccatgagaagaaagaagaaggctgtgcacaagacaactaccacggatgacaaaaggctccaaagcactctcaaaagaattggggttaatgctattcctgcaattgaggaagtcaacattttcaaggatgatgttgtcatccaatttgtaaatcccaaagttcaagcctctattgcagccaatacatgggttgtcagtggtgctcctcagaccaagaaattgcaagatatcctcccaggaataatcaaccaattagggccagataacttggacaacctaaggaagctggctgaacagttccagaagcagtcacctggtgctgctgccacagcaggcgcaactgcaatgcaggaggatgatgatgatgaggtccctgaacttgttccgggggagactttcgaggctgctgcggaggagggtcacaaatcttagagactctacatggattttgtgcctttccatatatatttcgtggtgtttaaaattttgccttcttctcttcgcccttcttactttcacattttgatgaagtgttctgtgattgtcatctcatgatcctgtgacacactaattagctaagttactggaaactctagttcaaagctactctcttttatctttaaaaaaaaaaaaaaaaaactcggcaacttcgatcctccttagttttcgacttcaattcgcctttaccgtaaatctgagaatgtcttgctgcggaggaagctgtggctgcggctctggctgcaagtgcggcagcggctgcggagggtgcaagatgcatgccgacctgacctacaacgccgagagcatcaccgccgctgagacc

SEQ ID NO: 189 - DNA, 536 bp, Eucalyptus grandis
ctccatttcaaattacagacgagaggctctctcaccttctccgtcgctctgaaaccccacgccctacagaccttctactacaatgggggaacccatctttctccccggccggacgagtctcgtcggctcgatcagtgtcaacgtagttggaatccaacacaatgccggcaccttcagagcgggcgagacagtggcacttgtccgcgagccgtccaacactgatgatgagatggccatccaagtcctcaacacgaggggcatggtggtcggctacatcaagcgcgaagctgccaaagtcttggccccactaatagactctcagctgatctccgtctacgccattgtgcccaaagttcctagggtcgagaagctgtttttcatcaattgccaagtgcgagtattagcgagggatgatgacttcgagcacgtgaagtcaacgatcttggaaggcaagttgatgctcaccccgccggtggggaaggaggtgagaggcgtgaacgagagtttcacgttggtcggccagggtgtcgagaaga

SEQ ID NO: 190 - DNA, 2444 bp, Eucalyptus grandis
ctctcctctttcctctctctcctttctctctctctctctctctcgaggataaacagaggacgcgaaaaggaattgactcggggggtgggagtcgcgccaggagcttcttccctgcgctgagatctgatgctctgatttctccagtgtaacgggaacccagcaaatccagcaacctcgtgcgtcggagtcggtgttcaccgcttgttttcggattccgatcttataagtttgtgagggttttgtggttttttcgtggaagatctatatcagaaaatgatgatgttcgaggatatgggaatctgtggcgatctggacttcttctctgcccctctcggggagggacatggggttgctccgcaaactgagccagaggccaccgtggaggatgattattccgatgaagagatcgatgtggatgagctcgagagaaggatgtggagggacaagatgcgtctcaagcggctaaaggagcagaacaaggggaaggagggagttgatatcgcgaaacagcggcagtcccaagagcaggcaaggaggaagaagatgtcgagagctcaggatggaattcttaagtacatgttgaagatgatggaggtctgtaaggctcagggttttgtgtatggaatcatcccagaaaagggaaagccggttaccggggcatcagacaatctaagagaatggtggaaggacaaagtcaggttcgatcgaaacggtccagccgccatagccaagtaccaagccgatcattccgttcctgggaagaatgatggatgcaaccccatcggacctaccccgcacactctgcaagagcttcaggacacgacccttggctcgcttctgtcagcactcatgcagcactgtgacccccctcagaggcggttcccattggagaaaggcgttcctcctccatggtggcccactggaaacgaggactggtggccccagctgggtttgccgaaggatcaaggagccccgccctacaagaaacctcatgatcttaagaaggcatggaaggtaggtgttctcacggcggtgatcaagcacatgtctcctgatatcgccaagatacgcaagctcgtgaggcagtccaaatgcttgcaagataagatgacggccaaggaaagtgctacttggctggctataataaaccaagaggagtctttggcacgagagctttaccctgattcatgcctcccactgtcctcatctggagggagcgggtctttggtcataaatgactgcagtgagtatgatgtcgaagggatggaagacgagcccaactatgatgtacaagagcgcaagcctgagaatctcaacccaccatcccatctggggctggagagaatgagaggtccttttgtccagcaatcgcctttccaaatgaagggagaagttgtcagcaacttagatatggcgcggaagaggaagccgtgcaatgatttgaatatggtgatggatcacaagattttcacctgtgagttcctgcagtgcccttatagtgaactgaggctggggttccgtgacagaacctcaagggacaatcaccagctgagctgcccttacagaagcaattcttcagagtttggcgggtcaaacttccatgttaatgaggtcaagccagtgattttccctcaaggttttgtccagtccaagcccatgacttcaacggtcaattcagcatcaaccccctttgatctatcagggcttggagttcctgaagatgggcagaaagtgatatctgatcttatgtcgatctacgataccagcatccaaggcaacaagaacatgaatcccgcgaatgatgcgatcatagaagaccagagccgtcctcagccaaagcttcaacaacaaaacgagtttgtgggatcattctttcagcaacccaatgcttccgccaatcatcacatgttctcccgagaggacattcagttcgaccggttcaagaccatgaattcttcgttcgaggccaacaaccacaaccacgacaacctacagctcatgttcgggtctccattcgatttgtcgtctttcgattttaaggaggagttgccaggtggggtcatggatcccctgccgaagcaggatgtcactatatggttccagcaatgatttctgcgtgctcagcttctcgggcgttcttgggaactgtatatttctctgaagagagatctatatacttaactgtggtctcttgttagatcgagtttaagttttcttggccaaggtctttgcttagcttatgtattctctcgaactttgttaggtgtagatttagaaagtttaggcaggggtttagatggggaaataagatattagacaaggacccatgactagccctgcttgctgctgaatatataaaaatgttgtctgatcaagtgattattctactagactgtcctataaataagtgaggtgcgttttcttttaaaaaaaaaaaaaaaaaa

SEQ ID NO: 191 - DNA, 473 bp, Eucalyptus grandis
cagcaagcaaaagaggaaaccagaaaaaagcagacacctcggtttcacgttctctactacagaattccggagatggtgaagagagacagagaggacacggaggtcgaagccctggccctggccaactgcttgatgctcctctcccgagtcggcaagagcaccgactcgccatggctgaaccacaaatcccggcctacggagcggatgttcgcgtgcaagacgtgcaaccgcgagttttcatccttccaggcactcggagggcacagagccagccacaagaagccgaagctgtccggcgatctcttccacctagggcgctccgcggattcctcaccggccaagccgaagacgcacgagtgcgcgatatgcggcctcgagttcccgcttggccaagcccttggcggtcacatgaggaggcacagggccgccatggcggagagcttggcgacggccgaaaagcctgtgccggtgtt

SEQ ID NO: 192 - DNA, 468 bp, Eucalyptus grandis
caaaaaagttacggttggattgcggtaaagaaatggtgatggatatttcaaatgacgaccgctatcttaatgaagagattggtggtccgaaggatgcacttgatgatggaactcagcctaataacaagaggaagcgcggtagagcaccaaagagggctatgaaggctgaaagggaaaagttaaagcgtgatcatctgaatgagcttttcgacaaactgggtagtcttcttgaattgagtgagccgaacaacgggaaggcctctataataaatgagactatccggcttttaaaggatatgatttctcagattcaaagtctaagaaaggagaacacgactttgttgtccgaatctcattatgttgcagcagaaactaatgagctgaaagacgagaattttgcactcgaagctcaaatcaagaatgtacaaagggaattagaagacaagttaggccattctaagcccgacc

SEQ ID NO: 193 - DNA, 968 bp, Eucalyptus grandis
gagtgtctgccacttctagatatgacccagcagcctccttggcaggaattggttgcaactgatctacatggcaatgaatggcatttccgacatatttttcgagggcaacctagacgccacctactcactactggatggagtgtctttgtgagctccaagaagttgatagctggtgatgcctttatatttttgaggggtgaagatggagaattgcgcgtcggtgttaggagattaatgagacagcaaagtaacatgccatcctctgttatatctagtcacagcatgcatcttggggttctggccactgcatctcatgccattgcaactggaactctcttttctgtattctacaaaccaagaacaagtaggtcagagttcattgtgagtctcaataaataccttgaagcacgggcccacaagctatccattggaatgaggtttaaaatgaaatttgagggtgaagaagtttcagaaagaaggttcagcggcacaatcattggtgtaggagacagcatgtcatctggatggactaattctgaatggagatccttaaaggtccaatgggacgaaccttcatcaatcatgcgtcccgacagagtttcatcatgggaattggagccacttgttgtgactgctccttctaattcccaacaggtacagaggaagcgagcacggccaactgttttaccatcatcatcagtgcaagaactttctgcgttcggtggacctaaagctcctgagtattcttcagattttctacatggcgattcccagaggggaagagatgtctatctctctcccaagttttctccatctgctaggtcaaaatctttaaattacaatggaaatggttcaccagctgcattatctggctacacagtcaactggcctagtcatatggaaactattactgatccatgtacaccagtcaatgggaaagaatctagtgaaaagagagagagcggtgg

SEQ ID NO: 194 - DNA, 345 bp, Eucalyptus grandis
cggccgcctgcagctttcccctccgtgtcgacacgacgacgactccgccgccgctcccccctcgcgtcgtctctccttctctcgccctgtatatatctctcgtcccccgacaaaaaaaggagaaatctgaagagaggggactgaaattaggttattgagaaggattcttcccgtgaccaatcttttggagaaagatggcttctcaatttaatttcaaaggcataaccgatgcatcgcaagctgaaggagtagctgggaaatcacacggaaatcactctttaactcggcagccatcaatatatgctttgacttttgatgagtttcaaaacacatggggtgggcttg

SEQ ID NO: 195 - DNA, 456 bp, Eucalyptus grandis
gagacttcccctagctcatcttcactcaccaccaccaccgcccccgcccccgccgccgccgccgccgccgcaaccacctcatcctcctcctattcctccgccgtggcggtcgccgcgacaacagcaacaacctcctcctcctccacctcctcgaccgggtcggatccggcgctagaaccgagcaaaagaagcgaggattgcacttctcaaaagggcccggggaagtccccgagcccgggcgcccacccggaggagccggccggcaagaggcacaaggccgggggctccggcgagcacccgacgtaccgtggggtccgaatgcggaactggggcaagtgggtgtccgagatccgggagccgaggaagaagtcgagaatctggctcgggacgtaccccacggcggagatggccgcccgggcccacgacgtggcggcattggccataaagggcagcttc

SEQ ID NO: 196 - DNA, 569 bp, Eucalyptus grandis
aaaagcagaaaaagaaaaaagagagcaaaaaaaaggcaatcgagagcagcttctccatttcctttcttctcttccgctcgatccatttcgaaatccgcagagaattgtcgagaagagacgagacgatgttcccgagacccaaagtcgacccggcctccgccggaaccgtcgtgatccgcgaggtgtgggcccacaacctcgagtccgagttcgacctcatccgcgacgtcgtcgacacccaccccttcatctccatggacaccgagttcccgggcgtcgtcttccggccccctcctcccccctccgccggcgggcactaccgccgcctccgcccctccgaccactaccgcctcctcaagtccaacgtcgacgccctcagcctcatccaggtcggcctcaccttctccgaccccgacgggaacctccccgacctcggctgccccggcggcccccgctacatctgggagttcaacttccgggacttcgacgtcgcccgcgacgcccacgccccggactccatcgagctcctccgccgccaggggatcgacttcgagcggaaccgggcggag

SEQ ID NO: 197 - DNA, 1007 bp, Eucalyptus grandis
ggaaaccatctgaaaggcgtggtgggcctcggggtcctttccgtggaagtggaggtcgccgtggcggttttaacaatggagaagctggcgagggggagcgtccaagaagaacatttgaacgccgcagtggcactggacgaggaaacgagtttaaacgagatggagctggtcgtggaaactggggaactcctactgatgaaattgctccggagcctgaagaacctgttgtggaagttgaaaaaaatgtgggatctgagaagcagttggttgatgaggaggctgcagatgctagcaaagagaatcctttgaatgaaccagaggaaaaagagcctgaagataaggagatgacattagaagagtatgaaaaggtccgcgaagagaagaggaaggcattgcttgcattgaaggctgaggaaaggaaagtggaggtggacaaagagttgaagtccatgcaacaactctctagcaagaaggaaaaccatgacatctttatcaagctgggatccgagaaggacaaacgcaaagaggctgctgagaaagaagagagagccgagaagtctgtcagcataaatgagtttctaaagcctgctgaaggggagagatactacaacccaggtggccgtgggcgaggccgtggccgcggtgccagaggtggttatggtggtggaggtggtggtggctatggtagagatgcagctgctccttcgattaaggatcctggccagttcccctcccttggtgggaaatgaggttttaccactgcatacttcaagctgagttacttcatgcttggagttgttgtgatcttccaggataatcagttattaacgggaattacatttttcctgtaacagaaacctttgatattattcagtcttttttgagtgtaaattttagtttctccatggatttactttgcttttcttttgactcacttcagttttgattgtgttagaagagaatgaattaagccttttctaaaaaaaaaaaaaaaaaaaaaaaaaaaa

SEQ ID NO: 198 - DNA, 390 bp, Eucalyptus grandis
cccatttcttccttggctccgttctgttgcttcctctctctgtcttcgacacttcagctcgtgcgagcccaaaaatcgatccttttctgcttccttttgcctctgttccagctgtggtcgagtaagcaggagtcaattgatactgggtcgatctggtcggcaacttttgttggaagtttgaggaatctgattgagagaagaggtagatctaaaggatcaaaaggatgtcatttaccggcacccaagttaaatgcaaggcttgcgaaaagacagtttatcctgttgaacagttatctgcggatggggttgcataccacaagtcttgcttcaagtgcagccactgcaaaggcacattaaaggtgtgccaattttttcaattggtttacaatc

SEQ ID NO: 199 - DNA, 586 bp, Eucalyptus grandis
tgctttcctcctactctgtcactctcactctcactctcactcctcctcttggctctccctcaccatcttcccaggtcccgcgccgcggtatcgctgccccgaccattctcgccgtctgctcaataataatcggagcaaagatgattgatctcaacacggtggaggacgacgaaacgccgtcgtccggctcctcccctgcctcttctctgtcctctgccataagcgcttcgaatattaactccaaccctgcgtacccaacttcgtcttcttcttcttcgtcctcgtgctctcccttgtgcttggagctgtggcacgcctgtgccgggcctctgatttcgcttcccaagaggggctctctggtggtctacttccctcagggccacttggagcacgtctctgattttcccacttccgtgtttgatctcccttcccaaattttctgtcgtgttgttgatgtgaagctccatgccgatgcgagcaccgacgacgtttatgcgcaggtttccctggttcctgaaagagagcaaattgagcataaattgcgcgaaggggacaacgaaatagacttggatgaggatgaaattga

SEQ ID NO: 200 - DNA, 619 bp, Eucalyptus grandis
cagaagcgaccattaacgctgtctctctctctttctctctcctcctcctcctcctcctcctcctcctcgctttttcttgaaacaatcgataatccttccttccatctttcctcctcctcccccccttgaaatcccgaatccaccaccacaaccccccaccgccacctgctcgttgggtaatctctcttttgcttctggagagggaagtgaagtgatctcggatcagctgactttggagaatgatcctaaagctggtatttctacattgagatcatctttaagagcgctgtggttctctgatggcatctcatccatcaaatcattcgtgtgggcgccctcatcaaggtgcgtttgctgatgctttatacaaagagctgtggcatgcctgtgctgggcctcttgtcacccttcctcgagagggagagcgtgtctattattttccacaaggtcacatggagcagcttgaagcatcaacaaacagagggttggaacagcaaatgccttctttcgatctgccctctaaaattctttgcagggtagtcaatattcagctccgggccgaacctgaaacagatgaagtttattcacagataactttgctacctgaacctgaacaaaa

SEQ ID NO: 201 - DNA, 376 bp, Eucalyptus grandis
tttaatggccttgacgcaggggaggggagattttctgaacttggggagatggtagaatagctgccgaggtgtcaactcatgtcagaattctgactgatctggggatcttgctctcaaagaggatttctaagagcagtatctcaacttggcatacgttcagcaactggaaaatagtaggttcaggcttatgcaactggaacaggagcttcaacgagcacgccagcagggtatatttgttagttctggaaatcctggggatctcagtcataacatggctgccattggcaatggggccatggcctttgacaccgactatgcccggtggctcgatgagcatcaacggctgatcaatgacctaagatccggagtgaacttc

SEQ ID NO: 202 - DNA, 743 bp, Eucalyptus grandis
ttttttttttgtatataatctctttatttctagttagggaaaattcagaaagaagccgtgaaggaacttcatccaatggcgatggaaaatctgaagtgcaaggaaaggttgctggggaggtggatgctgcttctgagaatgtgtccggtggagccatcgaacgtcccagagccacaggaaaattggctgcgcctgtaaactcgcccagcatgtcctcatcattggacctgaagaattcttgcatggatgcaaatgccaaccctgtgagcattttgcaacctggtgtagtgccacctgaagcctggttacagaatgaaagagaactgaaaagggagaggaggaaacagtcgaaccgtgaatctgctagaagatcaagactgaggaagcaggctgagactgaagaacttgccaaaaaggtggattctctgagtgccgagaatagggctcttaaatctgaaattagtcaactaaccgagaactcggataaattgaggctagaaaatgccacattgatggaaagactggaaaatgcacagggagtggaaaaggcggttgaatcactgggtaaattcaacgacaatgggcttctctcggacaaaacagagaacttactttcaagggtaaacaactctggtgccgttgatcgaagaagtgaagatgagggagaaatttatgaaaggaagtcgaattccggtgccaagcttcaccaacttttggattcaaaacccagaaccgatgcggtg

SEQ ID NO: 203 - DNA, 435 bp, Eucalyptus grandis
ttttctctctcgccccaccacctgaagatggaggtcgctccacaggcggagcatcaccagaaccaccaccaccaccaccaccagtatcaccaccagccgcagcaaggggaaccgggaagctactttctctcggctcctcctccgccaccacactatagcagctctggcctgtgttatggtggtggcgttggagacaacaacaatggtgggtaccttcactctcctctttctgtcatgccgctcaagtccgatgggtctctctgcatcatggaagcactcacaagatccagaccccaaggattaggtcaaggttcaacgccgaagctggaggactttttgggtggtgcaagtgcaacagtgacagcaacgacaatgcctctcagcttggacagcttgtatagctaccaacagagtgccgacccagagaaacagtcg

SEQ ID NO: 204 - DNA, 662 bp, Eucalyptus grandis
gcgaaacgcagagagagaaagtagagagagagagagagacaagtattccctctcagtcaccccagccgacgatcctcccgccgaccgcctcctcccccggccgttccgatcctcccggcgacgcgacgacaatggtgaagccgagcggcggcggcggcgatcgggcccccccgctggcgccgttcctcagcaagtgctacgagatggtggaggacgaggcgaccgaccccatcatcgcgtgggggagcgccggcgacaccttcgtcatctgggacatcactcaattcaccctccagttgctcccccactacttcaagcactccaacttctccagcttcatgcgccagctcaacatctacggtttcagaaaagttgattcagatcgttgggaattcgcaaatgatggattcatcagaggtcaaaagcatatgttgaagaatatacgcaggaggaagaatgttcaggttgtggatcagaaaaaatcattgcagaagcaggataattccgttgaagaagtcgataaaattaaaatagatgggctttggaaagaagttgaaaatttgaagattgataagacagtcctttcgctggagttaggtaaagttagacagctccaggaaacttcagataataaattggtcctcctgagagaccgtgttcag

SEQ ID NO: 205 - DNA, 694 bp, Eucalyptus grandis
aaagtcccgagatgccgcgacgcgaattcccctctcgaatgcgctcggaattcgagcgatgatcggagcggcgaccaaccagatcccgccgccgccgccgccgccgcagccgcagcaagccgcgcccgccgccgccgcgatccggttccccgactccgtctacaacgcgctcagggtgggcgccgtcttccagcggctgtcgaagcacctcgccaccatcggcaagggctccggcctgtcggcatcttgcggtacttccatggagttcctgaactcgtgcctctgcctcgccagaggcattgactatgcggtcgcgaacaatgaggttctgcccaaagctcacgaattgcctgtcttattgaaaaggctctgccttcttaaagatgatagtttctatctttcagttataatggttctgatgatctctgttaagaatgcatgcaaatataaatggttttcagagaaggattgccaagagctccttgcccttgttgatgaaattgggaaaaactttcaaagtccaagagacgctgccgttggaagtactgcctctttttcccgagtttcaagtatatttgcaagattctatccacagctgaagatgggctacgatcttatttcgctggaagtagagcctggatatgcagcactggtcaatgattttcacatatctaagagcatggtgcactctcca

SEQ ID NO: 206 - DNA, 1210 bp, Eucalyptus grandis
ggaggaggaggtgaggaggaaatgaagggaaaagagggggagagaaaaggaattcaggcacggcaacaactggaaaggaacggggttcaaaggttctctctcttttaagcagtgagtgagggggtgcaaattctcattccaaccatgattctgtcttgagctcgtggggggtgagggagagggagacgtctccagctcgagtcgtcatctgggtccgcgtcttctcttcccttcttccaatggtttgatcctaggacagagagagaaagagagagatatacaaaaagagagatacagagagatagagggagagggagagggagagggagactcgtggcgctgtttcgagctttctagcttccggaggaggagggctggtgttgagcgaaacttggagaggtcatgaattcgacaaccactcagtttgtgtcctctagaaggatggggatgtatgacccgattcaccaaattggaatgtgggacgagaacttcaagcagaatggaaatcctaatgcgccgccagctctgatcatacctatgcacgcgaatttggacaaccagtcggaggatacttctcatggatcacaggatactgctggcaagtatgagcaagaaacatcgaaaccttatgataaggtgcaaagacgtcttgcccaaaaccgtgaggctgcgcgcaaaagccgtctgcggaaaaaggcttatgttcagcagctagaagcaagtcgtttgaagcttatgcagttagaacaagaggttgaccgagctagacaacagggtgtgtacatggcttcaggagtagattcagcttatccaggatatggtggatgtttaaattcaggaatcgttgcatttgagatggagtacgggcactggattgatgaacagaatagacaaatatgtgagctgagggctgctttgaatgatcatagaactgacgtagagcttcgcatcctcgtggaaagtggcatgaaccactatttggaactttttcgcatgaaagcggttgcctcaaaggccgatgttttctatgtgatgtccggaatgtggaggacatcgtcagagcgattcttcctgtggatcgggggatttcgtccttcagaacttcttaaggttctcatgcctcagctcgaccccttgtcagaccaacaatgggcgtttgtttccaacctcaggcaagcttgtcaacaggctgaagatgccctaaagcaag

SEQ ID NO: 207 - DNA, 438 bp, Eucalyptus grandis
aatcaacaccactccccaatttctctctctaagatcccaccccaaccgccaccctcaatctctctctttctctctcttcttcagtgtctgccccgtctgcgacaagggcttcccctcctaccaggccctgggcggccacaaggccagccaccgcaagcacgcctcctccgccgcggccgccgccgggggtgacgaccagccgaccacctcgagcacctccgcggcgacgacctcctccggcgtctccgggaaggtccacgagtgctcgatctgccacaagagcttccccaccggccaggcgctcggcgggcacaagcggtgccactacgaggcccccgcccccatccccgcctccttctccgccccctccgccgccgccgccccggccgccagcggggtgagcgtgtcggagggcgtggggtccacgcacacgcagag

SEQ ID NO: 208 - DNA, 516 bp, Eucalyptus grandis
agacatcacaaaattcagcagctacaacgagctcggagtgagcttgctcgcatgtttagccttgaaggccagttggaggaccctgtgagatcaggctggcagcttgtattcgtagatagggagaatgatagtcttctccttggtgatggcccttggccggagtttgtgaacagtgtgtggtgcatcaagatactctcacctcaagaagtccagcaaatgggcaaacaagatctggagcttctgaattccatccctgttcaaaggcactcgaacggcggttgcgatgaattcacaaaccgacaggattctagaaccattaactccggaataccatctgtggggtctcttgattatggaactctatgacctgttaagatgcaatttcttgctgtaatattcagtgttgtccaagccatccgtggttggaacgactcgcttagttcttaccttagattgtaacactcatgcagaatttagcactgtaatgatatttgcttctctcccaaaaaaaaaaaa

SEQ ID NO: 209 - DNA, 547 bp, Eucalyptus grandis
aaccgacgacacaggtgacaagaatcacaggttcgaagggggtcaattgggtgttgcagcagcttctgattccagtgacagatcaaaagaaaaagccacagatcagaagactttacgcaggcttgctcaaaaccgtgaagctgccagaaagagtagattaaggaaaaaggcatatgtccaacaactggagagtagcaggctgaaactcacccaactagagcaagaactgcagcgagcccgtcagcagggcattttcatttcaggtagtggagaacaatcccactcaatgagcggaaatggtgccctggcctttgatgttgaatatgcacgttggcttgaagagcacaacaaggttgttaatgagctgagaaatgcggtcaatgctcatgctggggacactgagctacggacaattgttgacaatgtcgccgcacactttgatgaaatcttcaagctgaaaggcactgcagcaaaagctgatgttttccacattttgtctggaatgtggaaaactccagcagagcgatgctttatgtggattggtggg

SEQ ID NO: 210 - DNA, 522 bp, Eucalyptus grandis
aaaagagcgaccattctctctctctctctctctctctgtgaagatcctctctagcgataaatcactgttgcccatttcttccttggctccgttctgttgcttcctctctctgtcttcgacacttcagctcgtgcgagcccaaaaatcgatccttttctgcttccttttgcctctgttccagtacagctgtggtcgagtaagcaggagtcaattgatactgggtcgatctggtcggcaacttttgttggaagtttgaggaatctgattgagagaagaggtagatctaaaggatcaaaaggatgtcatttaccggcacccaagttaaatgcaaggcttgcgaaaagacagtttatcctgttgaacagttatctgcggatggggttgcataccacaagtcttgcttcaagtgcagccactgcaaaggcacattaaagctgagcagctactcctcaatggaaggagttctatactgcaagcctcactttgagcagcttttcaaggagactggtaatttcaacaaga

SEQ ID NO: 211 - DNA, 1160 bp, Eucalyptus grandis
ggattctgaaggcagagctcttgaggagctgggggtagatgagaatgatatcggaggatctcctccaagatcaactcctcacatgttctgtaagacactcacagcttctgatactagcaccccggagggttttctgtcccacgtcgagcagctgaagattgctttccccctctggactataagcagcaaaggccttctcaggaacttgtcgccaaggatttgcatggagtcgaatggaggtttcgccatatttatagaggtcagccaagaaggcatctgcttaccacaggatggagtgtttttgtgagccaaaagcgtttttcatgtattctacagtccaagggcaagccatgcagagtttgtcgttccctatcagaagtatctcaaaagcatcaacaacgtgatatgcattgggacaaggttcaaaatgagagttgacgtagatgatgcaccagaaaagaggtgtactggtgtagtgactaggataggcgacttggatccttataggtggcccaactcaaaatggagatgcctgatggttcaatgggatgatgatatcacgaatgggcatcaagatcgggtctcaccctgggaaattgatccatctgtttctcactcacctttgagcattcagtcctctccaaggcttaaaaggccgcggactagtctgccaacaatgccgcctgtccctggtggaggggtcaggcttttggactttgaggaatctttacgatcctctaaggtcttgcaaggtcaagaaaagttgcatttggtgtcacctgtctatggacgtgacaccctaaactgtcaggtcgatttcgaacaatcccctgcacatcagggtctagcatctgttgtaagtaagaaaaggccaacaatatcaatgagtacatgagggctaatgcccctagttatgcaggctttgtggaatccgatagattcccaagggtcttgcaaggtcaagaaatatgcacactgaagtctttgacgactaaacctgagtacaacctagggacctgggggaaatccagtctttcgtgcagttctttcggtgtgcatcaggcacccaagtaccatttcgaccaagtgaaatcatccgaaagccttcagaaagtgtactttccatataatgacattcttaaatccagccaagatcgcac

SEQ ID NO: 212 - DNA, 850 bp, Eucalyptus grandis
ttcgacgggcaaatcgtccccagactgttatgccttcttcagttctatcaagtgacagcatgcatattggccttcttgcagcagcagctcatgctgctgccacgaacagccgctttacaatcttttacaatccaagggccagtccatcggagtttgtcatacctctggcaaaatatgtgaaagcagtctatcacacaagggtatctgttggcatgcgattcagaatgctttttgagacagaagagtcaagcgttcgtagatacatggggacgataacaggcattagtgatctggatcctgttcgctggcaaaactcacattggcgttcagtaaaggttggatgggatgagtcaactgcaggtgagaggcagccaagagtatccttgtgggaaattgagccactaacaacattcccaatgtatccttctccattccccctcagactgaagagaccatggccatctggacttccttcatttcatgcccttagggatggtgatatgagtatcagttcttcactgatgtggcttcaaggtgttggggatcagggagttcagtcgttaaacttccagggatttgggatgactccatggctccagccaagatatgacacttcaatggctgctttacaaactgatgtgtatcaggcaatggcaagcgcagcactgcaggatatgagggcagtggacccttcaaaatgtgcatctcagtctcttctgcctcttcagcaatctcaaaatgttcctatggggcaagcttctatcatccagaggcagatgttgcagcagtctcaatctcaaaatagccttcttcagggcttccaggaaaatcaggcaaaacccaaaggcag

SEQ ID NO: 213 - DNA, 534 bp, Eucalyptus grandis
ggacaagctgagggagatagaaaattcattgtttggacctgaatctgatatcagtgatagctgcaattgttgcctaaatagtgggagccaccaattcccgtcaactgggcagtggaatgtaaaccagatgatagagatgatccctaaattggatttgaaggacatgctgattgtctgtgcacaagcagttgccgaagctgacatgcctaggacagctgctttgatggaggtgttagagaggatggtgtctgtctcaggagatccaatccaacggttgggtgcttacttattagaagggcttagagcgaggttggaatcatctgggagcataatctacagaaagctcaagtgcaaagagcccactggctcggaattgatgtcttacatgtccatcctctatcaaatttgtccatactggaagtttgcctacgagtcggcaaatgttgtaattggggaagctataaagtacgagtcaagaatccacataattgacttccagatcgctcaaggaagccagtggatccctattatcca

SEQ ID NO: 214 - DNA, 358 bp, Eucalyptus grandis
ctcctctcctccctcactctccctcttatctcctccctcctctcctccgggtacatgcaagaattcgagggggagagagggagagagcgtgctttgaacatggggaggagcccgaggtgcgacaaggacgggctcaacaaaggagcgtggacggccgcggaggaccagatcctgatggactacgtcaagctccacggcgagggcaaatggagccggctctccagggaaaccggtctaagaagatgcggcaagagctgcaggctgcgttggatgaattacctgaggcccgacatcaagagagggaacatctcgcccgacgaagaagaactaatcatccggcttcacaagctattgggca

SEQ ID NO: 215 - DNA, 988 bp, Eucalyptus grandis
actcccctcgccccccctacatcatccctcctcgctccttccgtcctttctctctcctctgcttcttcttcttcttcttcttctccttcttcttctttctctctctagctctctcgctctggcccacgcggctgctcctccttcctgctctctcccccccatcgcggccgagcttaatgtgagctcagcttcgagatctgcgtagattagggttttttcgcgagccgagcccgccatgcgcccggccctgtccgcggggcccgccgcctgaatgcgctcgccgcctgctcggtggagccgacgccgcgcgcgggggggtcgagggggaggggaggaagatctagcgggagcctgctacgatggttagggatttcgtctactgtatcggcatcgatttcggttgaggcttttcgtttcctcttcttttctgttggggggtggggggtgggggcgcgcgagggaccggtttccgccccggcaatggatgcgtccgcgtaggaggcgcggtccgtgcgaggggaggagggcggtttgcgcgggggggttttgggagttgaagacgggaagaaagtggagcttgtgctgaagaatgagactctcgtcgtcgggcttcaaccatcagtcgccggaagcctcaaatgcaggggagaagaaatgtttgaactctgagctatggcatgcatgtgctggtcctcttgtgtcgttgcctcctgttggaagcagagtcgtctactttcctcaaggacatagtgagcaggtggctgcttctactaataaggaagtagatgctcatatcccgaattatccaaacttatccccacagcttatctgtcagcttcataatgttaccatgcacgcggatgtggagacggatgaagtgtatgctcaaatgaccctgcagcctctaagtccgcaagagcaaaaggatctatatctactgcctgctgaacttggaactcccagtaaacagccaacaaactacttctgc

SEQ ID NO: 216 - DNA, 669 bp, Eucalyptus grandis
cttctcccttcctttccttgaccacgtcgtcgtcctcctctcctccgcgtcgcaaaatccgaaccctaggccgcgcagcgaaccgccggaatccatcgcccgcggaggtcgccgccgccgccgtacatgcttatttatcgcgccgccgccccgccgagcgtattctccttcgatcgggccctatgagccccgcgcgatcgaagccgatcgcgatccgggccgtcttctacgccaacctcgagtccgagttcgcgctgatccggtccgtcgtcgaccggttcccgatcatctccatggacaccgagttccccggcaccgtgatccgccccggccccgccggcgggggcggcggccgagcgctgccgccgccggagagcaactacggcctcctcaaggcgaacgtcgaccggatgcacatgatccagatcgggctcacgctgtcggacggcgagggcaacctccccgacttcggcaccaagtgcgcgtacatctgggagttcaattttagggatttcgacgcggcgcgcgacgtgcagaacccggactcggtggcgttgctccggaagcaggggatcgatttcgagatgaacaggcagaagggcgccgactcggcccggttcggcgagctgctgatgtcgtcggggctcgtctgcaacgatgaagtgagtt

SEQ ID NO: 217 - DNA, 334 bp, Eucalyptus grandis
ccgtggcggttttaacatggagaagctggcgagggggagcgtccaagaagaacatttgaacgccgcagtggcactggacgagggttggtattgtacaccaagaatgttgcattttagctttgaaaacgagtttaaacgagatggagctggtcgtggaaactggggaactcctactgatgaaattgctccggagcctgaagaacctgttgtggaagttgaaaaaaatgtgggatctgagaagcagttggttgatgaggaggctgcagatgctagcaaagagaatcctttgaatgaaccagaggaaaaagagcctgaagataaggagatgacatta

SEQ ID NO: 218 - DNA, 478 bp, Eucalyptus grandis
cagtcgggtttgccgttagatgataggcccgagggagctcgctccccttctccggaacctatatatgataatatggggattaggatcaatacgagagagtatcgtgctcgtgagcgtctgaacaaggagagacaggacattattacacagattattaagcggaatccagcgtttaagcccccggctgattataggcctcccaagctacagaagaagctgtacataccgatgaaagagtaccccggttacaattttattggacttataataggacctaggggcaatacccagaaaaggatggaacgtgaaactggtgcaaagatcgtcattcgtggaaaaggttcagtgaaagagggtaggttgcagcagaagagggatttgaagcctgatccagcagagaatgaggatttgcatgttttggtggaagcggagacacaggaggcactagatgcagctgcagggatggtggagaaactgt

SEQ ID NO: 219 - DNA, 1677 bp, Eucalyptus grandis
ccgttccttccccgttccttccctgatcttccgtcgtccggcggttccccgttccggctccagcaatgtgtgggggcgccatcatctccgacttcatccccaaccagagggcccgccgattgacctcggacttcctgtggcccgatctgaagagatcggccggcaagcagtcgaggcggccggccaggtcggaggtcgtcgatgtcgtggacgatgacttcgaggccgacttccagggcttcaaggacgagtccgacgtcgaggacgacttcgacgacgaggtcgaggtcgacgtcaagcccttcgctttctccgccgccgagcctcggtactccaaaggctcttcgaccaccaaatctgtggagtataatgggcaagctgagaaatctgccaagagaaagaggaagaaccaatataggggaatcaggcagcgtccatggggaaaatgggctgctgagatccgtgacccaaggaaaggggtccgagtttggcttgggacgtttaacacagcagaagaagctgcccgagcttatgatgctgaggctcggagaattcgtggcaagaaagctaaagtgaacttccctgatgattcttccagtgcatcatcaaaacgctctgtgaagtcaaatgttcagaaacttcccaagacaacaacaaacaacgtgcagcctaatctgaatcaaaatttcaattatgcaaacagctctgatgatgacatttacagttccatgggttttgttgaagaaaaaccacctactaaccagttttacatggatgctttgaatgcccaaggggtttctggaatgaattctctttcccctgctgacaatgcccccttgtacttcaattcagaccagggaagcaactcatttgagtgttctgactttggttggggtgaaaatgccccaagaactccagatgtctcatctgtactttcagctaccctggaagttgatgaatctcagtttgaggatgctaacccaaggaagaaaatcaggtctgcttctgatgatgtgtccgaggaagaaaacaccgctgcaaagacattctctgaggagctgtctgcttttgagtccgatatgaagttcttccagatgccatttgtggatggtggctgggatccgtcagtggaagccttacttggtggagaggcaactcaggatggtggaaatgcagtggatctctggagctttgatgacctcgctcccatgatggggggagtcttctaaaagagttaccgttggctggtttttttatgtaaataaggctacatgttagtgagtcctcgactgtctgcctgtcttattatattgagttgttttccgatgttaaaaagtcctagtcaatgagaaagagagattgcttcctaatatgctgcaatgctttcaggaatgatttgtctactgtggtggtggagtaccaaacgtttgaacatggttaagccttggatgaagtgtggtttcccagtcagatatgtggtatattggagtatgctgctgactaggttaagttttaaagtccagaccttcttattggaattttgaacttacgtctgtaatttgatgattatgtgtgataaatgctgaaactctgatgacagcaatagcttgttctgttggccagtgcttctctcaataattgccagggcctgtgataaattgtggcaaaaaaaaaaaa

SEQ ID NO: 220 - DNA, 916 bp, Eucalyptus grandis
cacggcggcgccgccgggtttcttgggccgagggccgtgccgatgaaacaggcaggtctcgcccagaagcccacgaagctgtaccggggagtgaggcagaggcactgggggaagtgggtggccgagatccggctacccaagaaccgcacccgcctctggctcggcaccttcgacacagccgaggaggccgccctcgcctacgacaaggcggcgtaccggctgcggggcgacttcgcgcggctcaacttcccgcacctcaagcacaaggggtcgcacatccagggcgacttcggcgactacaagccgctccattcctccgtggacgccaagctccaggccatctgccaggacatggccgagaagccagccgacggcaagaagaggcgctcggcccccgccggcggcggcagctccgcagctgccgcctcgccgcggaggccggagccggagccggagccggtgaagacggaggtgggagtgtcggcggcgacgtcgtcctccccggagagcgacgacgcgtcggtggaggagtcgtcgccgctgtcggagctgacgttcaacgacttcgtggagccgcagtgggagagcgtgggggtgcccgagaacttctcactgcagaagtacccgtccgagatcgactgggctgctatctattcttgaagccttttttcacttctcatcatcatcatgtcatgtccagttttctccagtagtttcgtcttctttctctttcgaatttccaagaagcgcagtatgtaatatgttaggagtaatttagggaaagcagggggctctgctgcgatggagtttttggcagttgcagcggccactgctaagccttgtatcgtcgtgtaaatccgaccacggtcccgccggggttttaagtcggcggcgccggggatcatctcatgcattc

SEQ ID NO: 221 - DNA, 567 bp, Eucalyptus grandis
gcgttgatctgctcctgatcatggccctgatcgtatggaacgagcatgttcaatctctggcaattctccatgaaactgttagcatttccgctatgaccaccgtcgatggccatcccgtatggaccgcagaagccatggaagccgggcatttccttggataaacctgtctcctccttgggattcttttcttttctcagaccagttaactcagctaaaatgtcgtgtattatattgtgatgtgagaaattacttctaatttgtattatcaccatcttcttctgtagccacactatgaaagatctaagtttgaggcaatgggaagtggtgtctacacctggcaatgaaggaaagacagcgttggagagctgaagaggacgccttgttacgtgcatatgtgaaacagtatggcccaagggagtggcaccttgtgtctcagcgcatgaacactccccttaaccgtgatgccaagtcctgcttagagaggtggaagaactacctgaaaccaggtataaagaagggatccctcagtgaggaagaacagcgtcttgtcttccatttgttgccgtg

SEQ ID NO: 222 - DNA, 985 bp, Eucalyptus grandis
gtggttttgccgtcctcggggatggtgaaatcgagcggaggcgcgggggattctgatcattcagatcttgaagcgtccgtcgtgaaggaagctgatagtagcagagtcgttgagccggagaaaaggccgcgaaagcgaggtaggaaacctgccaatggccgagaggagccattgaatcatgttgaggccgagaggcagaggagggagaagcttaaccagcggttttacgcgctccgggccgtggttcctaatgtttccaagatggacaaagcgtcacttcttggcgatgcgatagcgtacatcaaggagctgaactcgaagctccagaccacggaatctgacaaggagaatctgcagaagcaaatggaatccttgaagaaggaattaacgaataaagactctcggtctgctctgccccagagcgataaagatctcagtatctcgagcaatcacggtgccaagttgatagaattggacgtggacgtgaagataatcggatgggatgtgatgatacggattcaaagcagcaagaagaaccaccctgctgcgaagctaatgcaggccctaatggagttggatcttgacgtgcatcatgccagcgtctccgtggtgaatgacttgatgatccaacaggcgactgtgaagatgagtggtcgtttttactcacaggaacagctaaggctggcgttgtcgtccaaaataggataagcccatcagaagtagaagagggagtgatggtaattaaactgtataaaagagcttgccgatgtttgaattgtcgacgcgaataatcaggggctgggatattttaaggctcccggcacagcaagttctgaagcaagagctgccatatgctgtttgttcctcttgtagttcttagtgtagcctgctagtgtttcttattaggtactttcgattgtggagcactgagaggatatgaaacaaggtggaattgttgttgaagataaaaaaaaaaaaaaaaaaa

SEQ ID NO: 223 - DNA, 335 bp, Eucalyptus grandis
tggagcttaaacctgataagattggtttacagaggagtgagcaattaagagatctttacgagtcgctgcttgaaggggaaactgatgcacaaaacaagcggccctcggctgcattatctccagaggatctcacagacgaagagtggtattacttggtttgcatgtcctttgtattcaatcctggcgaaggtcttccgggaagagcgctagcggatggccaaactatctggttatgcaatgctcaatatgcagatagcaaagtgttttctcgctcactacttgcaaagagtgcatctattcagactgtggtatgttttccctatctcggaggtgtg

SEQ ID NO: 224 - DNA, 377 bp, Eucalyptus grandis
ccaatcttcactccccctatcccctctctctctctctcaagaactaagagcttactatggaaagcgaacgctacgatgagacgacagagaagcagcgaatcaggagaaggccgcaccagaagccgtacaggggtatccggatgaggaagtggggtaagtgggtggctgagatcagggagcccaacaagcgctcccgtatctggctcggctcctacgccaccgccgtggctgccgcccgcgcctacgacaccgctgtgttctacctccgtggcccctctgcccgcctcaacttccccgacctcatcttgcacgagggccaggactcgctgggtgaggtctcagccgcctccatccgcaggcgtgcagctgaggtcggg

SEQ ID NO: 225 - DNA, 394 bp, Eucalyptus grandis
ctcaatctgacttgtcaggggtgggatagcaagaaaagggtctgaaagtttttcttgctgaatcttctttgaccctcggacaatcagacacagcatagatttaatctgcccgaggaaacacaaaagatggctttcactggaaccgtggataaatgtaaggtttgtgacaagaccgttcatgtcgtcgacatgatgactcttgaaggcattccctatcacaaaacctgcttcagatgcagccattgcaatgggacgcttgtgatgagcaactattcctcgatggatggtgttctctactgtaagacgcatttcgagcaactcttcaaggaatccggtgatttcaggaagaatttccattcagccaagtccgacaagccgaatgagatgacaagaa

SEQ ID NO: 226 - DNA, 340 bp, Eucalyptus grandis
gactccccctatcccctctctttctccctctcaagaatcaagagattactatggaaagcgaacgctacgatgagacgacagaggggcagcgaatcaagagaaggccgcaccagcagcagcagcagcagcagcagcggcggcagaagccttacaggggtatccggatgaggaagtggggcaagtgggtggccgagatcagggagcccaacaagcgctcccgcatctggctcggctcctatgccacccccgtggccgccgcccgcgcctacgacaccgccgtcttctacctccgcggcccctccgcccgcctcaacttccccgacctcatctggcgcgaggg

SEQ ID NO: 227 - DNA, 571 bp, Eucalyptus grandis
ccgactcagcaaagccaaagaaagaaaccagaaacagcagaccagaccattccattccattccatttcgcattctctactacagactcgcagagatggtgaagagagacagagaggacgcggaggtcgaagccctggccgtggccaactgcttgatgctcctcccccgagtcggcgagagcgccgtctcgaaccgcgaatcgcggtctacagagcggatgttcgcgtgcaagacgtgcaaccgcgagttctcctcattccaggcgctcggagggcatagaaccagccacaagaagcagaagctgatccccggcggcctcttccacctcggctgcaccgcggattcctcgccagccaagccgaagaggcacgagtgctcgatatgcggcctcgagttcccgatgggccaagcccttggcggtcacatgaggaggcacagggccgccatggcggagggcttggcggcagaggcggcgaagcctgtgccggtgttgaagagatcgaatagcaagagagtcatgtgcttggatttgaactcgtcgctgatggaggacgacttgaccttgcgttta

SEQ ID NO: 228 - DNA, 726 bp, Eucalyptus grandis
atgaggactccctggacaaggaaccccctcctccgcctcctccgagattcaaggtgcattctttctgcaagaccttgactgcctcggacaccagcactcatggtggattctcagtgttgagacgtcatgcggacgaatgcctcccgcaactggacatgtcaaaacaacctcctacgcaagaactagccgccaaggatctgcatgggaatgaatggcgttttcgacatattttccgaggccagccaaggaggcacctactgcaaagtggttggagtgtttttgtgagctccaaaagacttgtcgctggggatgcatttatattcctaaggggcgaaaatggggaacttcgtgtaggtgttagacgagctatgaaacagcaaggcaacgtttcgccatcagtcatatctagtcacagcatgcatcttggtgtccttgctacggcatggcatgccatttctacaggaaccatgttcactgtttactacaaacctaggataagccctgctgagttcatcatcccttatgatcagtacatggagtctctcaagaagaattactccattggcatgagattcaaaatgagatttgaaggggaagaagctccagagcagaggtttactggaacaataatcggcattgaagatgctgacccaaaagggtggcgagatacaaaatggaggagtctcaaggtgagatgggatgagaattctgccatacctcgtccag

SEQ ID NO: 229 - DNA, 752 bp, Eucalyptus grandis
gttcagaggggtgcggaagaggaagtggggcaggtgggtctccgagatccgcctgcccaacagccgggagaggatctggctcggctcctacgacacccccgagaaggcggcccgcgccttcgacgccgccgccttctgcctcggccgccccgccgcgaagctcaacttccccggcagccccccggagatctccggcgcggcgtccctctcccccgatgagatccagtcggccgcggcgagccacgccaactttggggccgtggccgtgccggcccgggccgagctgccccgaccaggatcgccggccccgtcgccttcgctgtcggcctcggaggcgagcagcgtgctgacgaccgagagcgacctgaccctggacctatcgttcctggattttctggatgattcgggcccggtttccggcgagccccatatcgggaagttcccgggcgtggaggaggctcccgacgttttctaccacatgcagttcccgagcgtggagagcgcggggctgaatctcgatactctattggcttcagacagcttcccgtggcgtatctgaagtggactgaaggaagaagcctggccgatcatttctctcttttttttttctttttttttctataattcttttgatggactagattttgtggggtcgtcatccacttcaggataatacagatgacaagaactgactttttatggtgtaaaaagacgtagcttttttgttggttcggttcaaaaaaaaaaaaaaa

SEQ ID NO: 230 - DNA, 563 bp, Eucalyptus grandis
ccgaggccgacttcctggccaaacactccaagcccgagatcgtcgacatgctgcgcaagcacacgtaccgcgacgagctagagcagagcaagcggagctacaggggctccgccgcggaacgggccgggaggggcgggttcgggccggggcggacagagtggtcggccgccgcccgggagcagctgttcgagaaggccgtgacgccgagcgacgtggggaagctgaaccggctggtgatcccgaagcagcacgcggagaagcacttcccgctgccgggcgggccggcggcgacgatgaagggcgtactgctcaacttcgaggacgtcggcgggaaggtgtggcggttccggtattcgtactggaacagcagccagagctacgtgctcaccaagggttggagccggttcgtgaaggagaagagcctgaaggccggcgacaccgtctgcttccagcggtcgaccgggccggacaagcagctctacatcgacttcaagccgcggggccagccgccggccggcccggccgcgccgccgccgccgcccgtacagatggtgaggctgttc

SEQ ID NO: 231 - DNA, 642 bp, Eucalyptus grandis
agtaaacccaccgaccagaacctttgtgaaggttcacaaatcggggacctttgggcggtcactggatatttcaaaattcagcagctatgatgagctgcgcagtgaactcgctcgcatgtttggccttgaaggccaattggaggaccctcagagatcaggctggcagcttgtatttgtagaccgggagaatgatatccttctcctgggtgacgacccttggcaggagttcgtcaacaatgtgtggtacatcaagattctttcccctcatgaagtaaaacaactgggcaaacaaggcatcaaccctgcaaattctgtcccaaggcaggctctctgagtgcatcacggtatttgatgagcatgtttggtcgacagagttgaccgatctgagctttggggtaggcagatgatgggggtcgctggactacttgaagccgagtcgtttggtgtaagaaacggacttggcttctgatagtgtttgaccgtgttgtagtgggtacctatgagaaaaaagagttgtagtaatatattgcttcgagagatgtagtgacgtggtaagtctatctcaagtttgctttataactgtaaagtttaacaccacggatgattgaagagaatgacatcgacattcccgtaaaaaaaaaa

SEQ ID NO: 232 - DNA, 1358 bp, Eucalyptus grandis
cgatttacccccctccctctctcggcatataaaacccgcaggtgaaacccgctctctctcccccacgccttccgcccgactcggactcggactcggccgagtcaacccacgccccccgcgagtcccgaccccccggcgccatgacgcggcgatgctcccactgctgcaacaagggccacaactccaggacctgccccgtccgcggcggcggcggggacggcgggggcgcggcggccgccccctcctcctcctccccctccacctcctcctctggcgccgcggcggcggcggcggcctcggcctccggcggcggggtgaagctgttcggggttaggttaacggacgggtcgatcatgaagaagagcgccagcgtggggtgcctgtccgccgcccactaccactcctcgtcctccgccgcggcatccccgaaccccggctcgtccccgatcgacgggagcgacggctacctgtccgacgatcccgcgcccggctcccgctcgtccaatcggcgcgtcgagaggaagaaaggtaacccatggacggaggaagagcatcgaaggtttttaattggtctccagaaattgggtaaaggagactggcgagggatagctcgtgactttgtgactacaaggactcctactcaagtggcaagccatgcccagaagtattatatccggcagagtaatgctggccgaagaaagaggcgctccagcctttttgacatggctccagatatggctactgctgaccaaccctcacatccagaagaaacatttctgcctcctttggtcagacttaacgatgatactaactcaacaacttcaaccagtatgggactcgatttggaaagaacgcctatggagacctcgcacccagaaacatctgaagggggcggtgatgttgcgatggaatcaattgatcaagtacctcttgtaccctgttacttcccatactatttaccactaccctttcccatgtggccgcccaacatggcgcctcctgaagatggaagggtggtggagacatctcatcaccgtgtgctaaagccaatcccagtaattccaaaagaacccctaaatatcgaccaaatagttggaatgtctcagctaagtcttgctgagaatgaacctgcaccactctctttgaagtttctcggggaaacatctcgacagtcagcatttatcaaggcgccttcttcagtcaatgaatcggatctcgacaactgcaaggatggcgccactcaagcagcttgactcgtgcctaagatcagcgacggtttagttcttgtgaatctttctgtaaaaccatctgtattggtgtcctccttttcctgttgtatctgctttctttaggctttc

SEQ ID NO: 233 - DNA, 506 bp, Eucalyptus grandis
aaataactacctacctttttctaagaactttggctttctttcggaacaggtgaaaagaagagtataaattcagagttatggcatgcttgtgcggggccattggtgtctttgcctccagttgggagtctcgtggtctactttccccaaggccacagtgagcaagttgcagcatcaatgcagaaggagactacttgtgtacccagctaccccaatctgcccgcaaagttgatatgcatgcttcacaatgtgacattgcatgctgatctcgaaactgatgaagtctatgcacaaatgacccttcaacctgtaagcaaatatgaccaggaggcgttactggcatctgatatgggcctcaagcaaagcaggcagcctacagagtttttctgcaagacgcttacggctagcgacacaagtactcacggtggattttcagttcctcgtcgagctgctgagaagatcttcccatcactagattttactatgcagccaccttgccaggagctaac

SEQ ID NO: 234 - DNA, 420 bp, Eucalyptus grandis
taaaaaccatgcagtctctcagccactgaacatggcgcttgaagctctcaactcgcccaccgccgccgcccccttcggccacgacgacgcggacggccacccgtgggccaaacggaagcgctccaagcgcccccgcgcggaccctcaggaccagccctccgaggaggagtacctggccctctgcctcatcatgctcgcccgccgccgccgccgacccggcagcagcggcaggctccacgagtgctccatctgccacaaggccttccccaccggccaggccttgggcggccacaagcggtgccactacgacggcggcagcagtagcagcgccgcccgtgctgcctcttcctcagaagccggcggtcctagccacacgactgtcagccaccgcgagccgatcgacttgaacttgccggcctt

SEQ ID NO: 235 - DNA, 476 bp, Eucalyptus grandis
gcgacacctactccaaagtggttggtcgctgtttgtcagctctaaaaagcttgttgctggtgatgcttttatatatctcagaggagaaaatggtgaacttcgtgttggagttagacgagcgatgaggcaacttaataatgttccatcttcgattatgccaagtcacagtatgcatattggtgtccttgcaacagcatggcatgccatttcaactggtacaatgttcactgtgtattacaaaccaaggactagccctgctgaattcatcattcctttcgataagcacattgaatctgccaaatttgattactccattgggatgaggttcagaatgacatttgaatggtgaagaagctccagaacagaggttctctggcactgtaattggatctgaggatgttgatcctccgaggtggcctggatcaaaatggagatgcctcaaggtgcggtgggatgaaatcacttccattcatcgc

SEQ ID NO: 236 - DNA, 799 bp, Eucalyptus grandis
cttcctctgtgcatgacatttcagaaaatggggaagctgatgaacagcaaaaacattcagaacagcatgagtcctcccctgcaactggagtgcctcatcctggtgtctctttgcccaatgtccaatatgcaacgcctccacaacttggagcgggacatgccatgacaccacctgcttacccctatccagacccttattatcgaagcatctttgctccctatgatgcgcagtcgtacccgcagcagccctatggtgcacagcctatggtccatctgcaattaatgggaattcaacaagctggagtgcctttgccatcagatgcagttgaggaacctgtatttgtcaatgcaaaacaatatcatggcatcttgcggcgtcgacagtctcgtgcaaaagctgagttagagaacaaagctcttaaatctcgcaagccttacttgcatgaatctcgacatttgcatgcattgagaagagctagaggatgtggggggcggttcctgaacgcaaagaaggatgaaaatcagcagagcgaggtttcttcagcggacaaatcacagggaaatatcaatctcaactctgataaaagcgatcgctcgtcctgaggtgcaacttcctgatcaatgcaaagtaatctctttcgtgcatgaatcatgcctgttcatcaatagatttcccctacctagcctagcctcaccaattgccctgctcttctgcttgtaggtcagtctctttagttggtagtgtgaatctgtttgtagttctgagggaaacctgctgcatagatagtagtttcgagtag

SEQ ID NO: 237 - DNA, 298 bp, Eucalyptus grandis
aagtgaaggatatgtttcaagatcaaagggaaaagtacgacacgttcctcgaggttatgaaagatttcaaggctcaaaggactgacactacaggagtcatagcaagagtaaaggaattatttaaagggcataacaaattaattctgggattcaatactttcttgccaaagggatttgaaatatcccccgacgaggatgaaacaccaataaaaaagaatgtggaatttgaagaagccatctcttttgttaataagatcaagaaacgcttccaaaatgatgagcatgtctataagtcatt

SEQ ID NO: 238 - DNA, 521 bp, Eucalyptus grandis
tccttccttctccttctccttctccttcgtctccttcagacatgtcgctcaaccaccccctctctacttcagacggcacccccaacactctctggtggaccactcaccccaccatgttccgccagcacaacctcctcctcaatttcaaccccaccgacgacgacccgcaagacgagggctcgcccccgccgccctacgtcctccgaggggcgccgccaccggcggagccgtcgcctgcagagaaagagcccatgttcgagaagccgctgacgccgagcgacgtggggaagctgaacaggctggtgataccgaagcagcacgcggagaagcacttcccgctggtgggcgaggcgacccagcagctgagcttcgaggacgagtccgggaagtggtggaggttccgctactcctactggagcagcagccagagctacgtcctcaccaagggctggagccgcttcgtcaaggacaagcgcctcgacgccggggacgtggtcctcttcaccgcgaccgcgccgacg

SEQ ID NO: 239 - DNA, 337 bp, Eucalyptus grandis
gcaattcttgctgccggggaggggcaaatcgggaacagacgataaggggatggcacagcgctcggctccggcgcccttcctgacgaagacgtaccagttggtggacgatccggccaccgacgacgtcatctcgtggggggagagcggccggacgttcgtggtgtggaagacggcggagttcgccaaggacctgctccccagctctttcaagcacaacaacttctccagcttcgtccgccagctcaacacctacggcttcagaaagatcgtgccggacaaatgggagttcgccaacgaccgcttccagcggggccagaaagaactcctctccgagatc

SEQ ID NO: 240 - DNA, 334 bp, Eucalyptus grandis
aggatgtggagggacaagatgcgtctcaagcggctaaaggagcagaacaaggggaaggagggagttgatatcgcgaaacagcggcagtcccaagagcaggcaaggaggaagaagatgtcgagagctcaggatggaattcttaagtacatgttgaagatgatggtggcccactggaaacgaggactggtggccccagctgggtttgccgaaggatcaaggagccccgccctacaagaaacctcatgatcttaagaaggcatggaaggtaggtgttctcacggcggtgatcaagcacatgtcttctgatatcgccaagatacgcaagctcgtgagg

SEQ ID NO: 241 - DNA, 422 bp, Eucalyptus grandis
ttttctcccacctccttctctctcctctctctctctctctacagtttcgcggcgaaatcaagtcccccggcgagctaggtttcaaccggcgaagcagccagaagaagaagaagaagccgaagaagaagaagggcggagatggatcagtggaggacggatttgggagcgtcgacttccgtccacccccagcagcaccagcaccagcaccagcaccacccgtccagcaggctgcacgcctcgcacgacgagcccaggcaaagggaggaagcggacgtcagggatcccgtggccgcgaggaaagtccagaaggccgaccgcgaaaagctaaggagggatcgtctgaacgagcacttccttgaactggggagcacgctagatcctgatagacctaagaatgacaaggcaaccattctcacggacac

SEQ ID NO: 242 - DNA, 737 bp, Eucalyptus grandis
aaaaagaccatttcttccgaacacaagaggaggcgggtggtggtggtggtgttgctgcttctggtgccgtccacttccttcttcccacctccatcttcatctctccctccctctctctctctgaatctaccgaacccttctcgccgaaggaggagagagagagagagagagagagagagacgggaagaccatcgctttcggccatcgcgtgcacgagcagtcatgaggagaggcagatgcgccgccgcggccgcgaagagggaggcggccgagatagcgccgccgccggtgccccatgcggctgcggcggcggcggcggaacccagatacaggggcgtccggcggaagtcgctgggccgatacacggccgagatcagagaccccgggacgaagaagctcgtgcggctcggcactttcggctcgccggaggaagcggcgcgtgctttcgacgcgaaggccgtggcgttccgcggggtcaaggccaggaccaacttccccgtcgccccgtcgagtttccctccggccgcttctcgcgatctgcgagctccgttgattgaatccagaaagttcggtcggagaggcgctcgagatcttcgcggcgaccaccacgacgtcagcccgcagagaccgacctcgagcagcttaagcagcaccgtggtgtcgtccagtggtcctcgaccgtcgccgtcgccggagacggcgaagcggcggactaggactccgccgcgccaccgccg

SEQ ID NO: 243 - DNA, 542 bp, Eucalyptus grandis
ctacaatagcaactcagatcccattagagaggaattcatgaaagcactagagccttttatgaaaagtgtttcccctgtttcttctccattatcatcattatcatcttgtgactcggtctttccaaaacaacagcctaatttgaatcctgacctttgctcctcttggatagtaaacccgatgggtctcgagcaatccggctcgattgggctcaaccgactctcccattctcaaatccaacatatccaggacgaaatgctactccgacgtcaaaatcaagaactttggttagcttccgctgtgaaatctcctctccagcacgaaaaattcgaccagtgtcggtaccaaaaccaccacggctctccccatctcctccggccgaaagccctctcaatgaagcgggtgggagtccctccgaaacccaacaagctttacaggggagtgaggcagaggcactgggggaaatgggtggctgagatcagacttcccaagaacaggacacgcctctggctcggcactttcgacaccgccgaggaggctgctc

SEQ ID NO: 244 - DNA, 848 bp, Eucalyptus grandis
gagagagagagagagaggaaggggtgtcatggatttgttcttccacgaagaggttcaaagcgacatcttctggtgcgatcaactggtggagccgccgccgccgccgccgccgccgctgccgccggctaacccaagcgccttttcaccgtatacaaaccggctgccgagtcaagaccgagggttcatgccgaacccggggaataatatgaacaagcgggtgatggagttcttgaggaggagctgggccgaaccgagccagatccaagaattcgaccgcgaacggggttttcgacacatgctgagcgagaggatgaggagggagaagcagaagcgtagctactcggcattgctctccgaattgcctcatggtaccaagaatgacaagaactccatcgtccaaacagcttgcatgagaatcaaggagctggtgaagtacaagcaagagctggagagacaaaacggggagctgaagtctggactgaacgagaagagcggaggggacaaagctgaagggaccaagatcagagtcaagattgcgaacccgacgtccgggattgattctatgttggaggtcctcaagtgcctggacaacatgggactgaaagctacggcgattcaaacgcagtgctcggccgaccaactcttcgccgtgatcgaggttgaaaatgaggtatgtgcacaacaatccgatgccaatgtacactaatcactggttcatgttcttcgcacgtgattttcatttttctcgaatgtaaagtaagaacttgtacgatgttcatgcagcacaagttcgaaattttcccagtccatgggaaggtccggcgtcttcgtttctggtgccaagcatg

SEQ ID NO: 245 - DNA, 181 bp, Eucalyptus grandis
gacatggcgcgacgtggcggaggaaggaggcgaacggcggctccgaggcgtccgacgccgtcttgccgcgagctcatcatcgccatcgttacaagggagtgaggatgcggaagtgggggaagtgggtggcggagatacggcagcccaacagccgggaccgcatctggctcggctcctacgc

SEQ ID NO: 246 - DNA, 117 bp, Eucalyptus grandis
cgagctgctgcagatccagaggaagaggaagaggatggagtcgaaccgggagtcggcgaagcggtcgcggctgcggaagcagcagcacttggacgagctcacgaccgaggtgggtcg

SEQ ID NO: 247 - DNA, 597 bp, Eucalyptus grandis
tctctctctcttcgtttctcccgtttctctctctctacctctcgccaagaaaccgccaggaaaggaaggaaggtaaaaagaaaagaaaaggaagccatggctccgagagaaaagcccagcgtcgccgccatcccaaaccctaacggcgctaaggaaatccgtttccggggcgtccggaagaggccctggggccgctacgccgccgagatccgggaccccggcaagaagacccgggtgtggctcggcaccttcgacacagccgaggaggccgcccgcgcctacgacaccgccgcccgcgagttccgcggcgccaaggccaagaccaacttccccacctccgccgagctgatctcctcctcccgcagccccagccagagcagctccctcgacgagccctcccccccgccgccggccggggccgtccaggccgccgccctcggcccgcccctcgacctcagcctcggccgccaccccgtcgccgccgccgccgccgggcccgggccttacttccccggcgcggccgcaatgtgcttcccggtgatgcccccgccgccgcggccggtgttcttcttcgaccccttcggccgcatggagcat

SEQ ID NO: 248 - DNA, 361 bp, Eucalyptus grandis
gaggctcagtacttcgtgtagccatggggcatgaaagtgaagcatttgaagagtttgttgatgcgcacaaaacttgcttgaatgatctcatgttcttccctactcgtaatgccttggactctcaagtgttgctgcaaatgcagaaaagcttgctgccttgcagaacgaatatcattttgctaaagcaaggattgatgaagatcatgagaaggcgcagcgactggagaagaaggtcaaaactctcacattcggctatcagatgcgggagaagactcttcgagaccaaattgagtcaaccttcaagcagctggacactgcagggacagaactcgagtgtttcccagctctgcagaagcaagag

SEQ ID NO: 249 - DNA, 472 bp, Eucalyptus grandis
ccatcgtcacctgtatccacaaaaacacacccaccttacctctgcacccgccccacccgcctatcgcagggcctgcgatacagacgcttggctgccaagcatgaagagaagccctccgctgtgctcgacaaatcccaagatcccacagacagcgcaaagccatccaagaagccccgccatcgtcacagtcccacccagctcgctgccctcaacgaactctttgagaaaagcgaacaccccactcttgaggagcgaggccagttggctgagaaattaggaatggagaccaagaccgtcaatgcatggtttcagaacaagcgtgcttctactaagaagcgcaataaggggggaacctcggaacctcacccagccacgagtcagaacgacttgtccgaagatgctctcaaaaccccttccgcactgccgtcgatagcgaacctgctcaacgacgcaccctcatcggcctcgccgc

SEQ ID NO: 250 - DNA, 302 bp, Eucalyptus grandis
ccccgcccacttatctgctatcctcgctacttcgctctattagtacctccacaatcccatgcgcaaacgccaacgcaccctcgacatgcacgccggcgcaccaggtcccaacgatgccattgacgcgaacagcgtcggcgacaacgcgttcatcgcggatcacgacgcaattgactcggccggcgacgacgacgacgacgaagacaagcccaagaccggccagaagcaaggccgccgcaaaataaagatcgagtttatacaggacaaatcgagacgccatatcaccttctccaaaaggaaag

SEQ ID NO: 251 - DNA, 708 bp, Eucalyptus grandis
gatcacgttccttcttcgagtgctctggacagtaggagctcctcaaaccgtacttctggggtgaccttagcagaggttttaccaacacccgggcagtctaagagttcagctgattcaggcttttgtgtcagtcatcttggtggggttcctgattcacaatcttcttcatacgcagcagagcatgttaatacacatcagactcaagagatacatttgccagtgccgcaggacaatgcagatctccctgatgcaaactttttggtttcggaaactgcaagtcctgactatcttgaaactctgtccgcagctttagatgggaccatggatgtcgagtcagatgctttttcttctgaacgagatgcgggaattatgctggatgatgtaactaatcttccagcgatcagtgatgtcttctgggaacagtttcttgcggcaagtccacttactgcagacacagaggagattagttcgacctctcatgaaactggcatcacgaatgatcaagagtcacacactaaggtggagaatggatttgagaaggcccattacatggatcatcttaccaaacagatgggtcatctcacctccaacaacggaacaggatgatatgttcttatctactttgtacactggataatctctttcagactagaggtgaatgccaatgcaggatgcgaataacaaattatgccaaaaaaaaaaaaaaaa

SEQ ID NO: 252 - DNA, 563 bp, Eucalyptus grandis
atttttcaactccccccccccaccccgaatcaaatcccattccctctctccctccctccctttttttcccccaatcttttgttgcgttttcaagcacccacgccccccaatctccaacgccatcaatcaagctcaagcaccatcacctcaagaagaaagaaggaaagaaagagagaaggaccggagacccgacagagggtcgcgcgcgcacgagacatgggacgatccccttgctgcgagaaggcgcacaccaacaagggcgcgtggaccaaggaagaggaccagcgcctcatcgactacatccgcctccacggcgaaggttgctggcgctccctccccaaatctgccgggcttctcaggtgcggcaagagctgcaggctcaggtggataaactacctccgccccgacctcagcgcggcaacttcaccgaggaagaagacgagctcatcatcaagctccacagcttgctcggcaacaagtggtctctgatcgcggggagattgcccggaagaaccgacaacgagatcaagaactactggaacacccacatcaagcgcaaagct

SEQ ID NO: 253 - DNA, 397 bp, Eucalyptus grandis
cctcgatgtaacgaaacgagctgcacgaggaatttgccggtagagagataaagaggagcgatggagatgaagggaggggtcgtcccgaaagaggaggaggcgtcgtcggacgtggggcagccgccgccgccgccgccgccgccgccgcagcccatggaggggctgggcgaagcggaggccgcgccgttcctgacgaagacgttcgagatcgtggaggacccggcgacggacccgatcgtgtcgtggagcgaggggaggaacagcttcatcgtctgggacgcccaccagttcgccgtcaccctgctccccaagcacttcaagcacggcaacttctccagcttcatccggcagctcaacacctacggtgtgttcgatgagtatgatactgcaagtttta

SEQ ID NO: 254 - DNA, 353 bp, Eucalyptus grandis
gaattacacccaaccaaaccaaaagagtcataattcaggatccaccttgtttagttaagcaagaataattttcccttcccttttctctttttgagccctttagagttacatgtcttgggtagcaatgacggggaactttgggtggggctcaaactccatggaagaggcgtggaggaaaggtccctggactgctgaggaagacaagttactcattgagtatgtgaagttgcatggggaaggaagatggaactctgtagctaggctcacagggctcaagaggaatgggaagagctgtagattgaggtgggtgaattacttgaggcctgacctgaagagaggtcagataacccctc

SEQ ID NO: 255 - DNA, 541 bp, Eucalyptus grandis
accaccaccagtaccaccacctccctctctctctctctctctctctctccttttccctctgttcgtgttcggtacgattgcgaagcggaaagcgaatgctcctctccggattgccatgaactccaacgcttcctccaacccccagtcgatggccacctccacgacgtcggcgaccacgccggcggcgggcggcgacggcggcaagaaggtcaggaagccctacacgatcaccaagtccagggagagctggaccgaggaggagcacgacaagttcctcgaggccctccagctgtttgaccgcgattggaagaaaattgaggattttgtgggctcaaagactgtcattcagatccgaagccatgcccagaaatacttcttgaaagtccaaaagaatggggcagttgcacatgttccacctcctcgtcctaaacgcaaagctgctcatccctaccctcaaaaggcatcgaaaaatgttttagtgccgctgcaagcatccatggcccagccttcttcaacaaatcctgcttttacaattacacct

SEQ ID NO: 256 - DNA, 477 bp, Eucalyptus grandis
agatagtccaagctctctgcctctctctctctctctcttctctatcttcatcttcgtcgtcttgatcgctctcatctcgctctcgcgaatgttgtctctcgtcttctcctctgtccgccattcaaagatcacctattctttccgtttggtttgcggtgactaagaactctttctctctctcgctctgtgtcactcttgctttctcccgacttttctgggattgatgaaaatggcggaaagatcgaactcgtcggacccggaaacaagcccctcgaactcaccctccacctcctcgtcttcttcctcgtactcgcccgacccgcgccgccgggccggctcgcccgccgcggcccgcgacccgttgagatcctccaagcggagcaagcacccggtgtaccgcggggtccggatgaggaactggggcaagtgggtgtcggagatccgggagccccgcaagaagtcccgcatctggctcgg

SEQ ID NO: 257 - DNA, 351 bp, Eucalyptus grandis
ggaaatggaggtcaaggtttaggatggccgggtttcaacagttcccattgagttctgcagttactgatgctgtcagaaatctattaagggaatataacgagaattatagaatcgaagagaaggatggagctctttatctctggtggaggaatcgagctatggcaacttcttctgcgtggtggtgaaacttgtgggttttgacgagtctgtaaagttttgtactagttgtagttcatgtttagcttgatgattagctttaattctacttccataggatcaagggagcaatgtctagaacttccactacactgtcataaaattcccaacttgaatttgaaaaaaaaaaaaaaa

SEQ ID NO: 258 - DNA, 360 bp, Eucalyptus grandis
tggtgtagggttccctgatcctgggcccgacaatggccaggtgctggatgctcgggacccactggccgagaagaaacttgaacttgcaacctgccaaaggagggtagaagaagaaatgctgaaacattccaaggcagtggaagtgacgaggacaagtaccttgaacaatcttcaaacgggtctgccaggagttttccaggcattagccagtttttcatccttgttcatggaggtccttgacacggtatgtacccgttcttatgctatcaaatagacatatgtatacacattctttcggtccggtatttttgttgaagtgggaaagatgagagctgggtaattttggcggttagctctcgc

SEQ ID NO: 259 - DNA, 318 bp, Eucalyptus grandis
tccttcctccctccctctcgccccttctgaatagcccgagatatttaattctctctcctccgtttctctcctcctcccgctcctcctcctccatcatttcctcctgaaccttctggaatccgtcatcgtctcgccagctccgatcttgtccccctcgctgccatggccgccccgccggcggagcagagcggctcggcctccggcggagagagccagcgctccgtccccaccccgttcctcaccaagacgtaccagctcgtcgacgaccccgccatcgacgccgtcatctcctggaacggcgacggctcctccttcatc

SEQ ID NO: 260 - DNA, 503 bp, Eucalyptus grandis
cctaaatcagctgcgaagtcgtcttatcctcttcgattcctgaagaatcgtgtcgctcttctcctcctcctcgacgattaagaatccgattttgatcgcggcggtcgatcgtcggcggctccgattcggcggcggcggaggcggaagatcggttgctcggcgcagcttcgcgtttttccggctcgaatcgcgctgccgggtgaggtaggtgagtgtcgggatcgtgtttttccggaggtcttcgcggcgtcgcttctgtttgatcggattgtggtctgattagccccccctaacttacgccggcgtgtttgggttagggttcggttcggttgggggtgtttcgaagatggacccgatggatatagtggggaaatcgaaggaggatgcgtcgctccccaaagcaactatgacaaaaattataaaggaaatgctaccgcccgatgttcgtgttgcacgagatgctcaagatctattaatcgagtgttgtgtagagttcataaacc

SEQ ID NO: 261 - DNA, 546 bp, Eucalyptus grandis
agaagcgctgagttcttggtcaaagtctagcagtttcgggttctccatcaatcgagtcggagtgggagaaaatgagcacaaatggtttgctgaagtttgaccaaagtctttagtgagatggttgctgtctccccgttctcctccaaacagatgtctgatcaaataacttacttgaccgccagtatgaactctcctttagcccagcttgttaacccaagaaggatgcacacctacgagccatttgaccagttccccatgtggggagacaccttcaaagctgacaaggtcaaaaatctcgaggcatcgtcatctgtgatcgtgcatgcagtagatgatggattggacaagaagtttgaatatgtttctcatgaatcggcagaaaattccagctccaggagcgatcaagaagcaaatagacctgacaaggtacagagacgtctagcacagaaccgtgaagctgctcgaaaaagccgtctgcggaagaagaaatatgtacaacaactagaatcaagccgcttgaagctagcacagttggagctggaactc

SEQ ID NO: 262 - DNA, 883 bp, Eucalyptus grandis
gcttcgtgtacgggatcattcccgagaagggcaagccagtgagcggtgcctccgacaatctccgagcctggtggaaggaaaaagtgaggttcgaccggaacgggcccgcggcgatcgccaagtaccgggcggaccactcgatccccgggaacggcgaggacgcggccaccatcggccccattcctcacaccttgcaagaactgcaggacaccactctcgggtcgctcttatcggctctgatgcagcactgcaatccaccgcagcggcgattcccgctggagaagggcgtggctcctccgtggtggcctacaggagaagaggagtggtggccccagcttggcctgcccgccgaccagggacctccgccctacaagaaacctcacgatctcaagaaggcttggaaggtgagcgtcctcacggctgtcatcaagcacatgtcgccggacatctccaagatcaggaagctcgtccgtcagagtaaatgtctgcaggataagatgaccgcaaaggagagtgccacgtggctcgcgataatcaaccaggaagaagctctgtccaggaaattgtaccccaatagcttcccgcccgtgtgttcggacagtggatttgggtcctatgtcatcagcgatgctagtgattatgatgtggaaggagctgatgatgaaccaaagttcgaggcggaggaatgcaagccttttgatccaagtgcttttggcatcgggccaagggtgtctacaggcgagcttttgatccatccactggtttctcaaatcaaaggagaagttaatgaaaccaaaaccaattcgcggctagtttcaaagaggaatcaaccatccgatgagccgaaggcgaagatggatcagaagatatacacatgcgagtt

SEQ ID NO: 263 - DNA, 454 bp, Eucalyptus grandis
gttcgacgagttcacagcgagctgacaaatcattgatcatggagcatgagtttagttcggctaaaatcaaagctcttcttgagattctacagtcgcaatgcagaggagaaagtgcaaatgcagagcttcatggtcccatgggctgtgacgatgagtctctttttgaaaatacaggcaccggggattctacatacagagttaaagctgttaagcacacaactgtttattcaagttctcctcctgaaggaccaattaaagcaattgtcttttctcagtggacgagtatgttaaacttggttgaacaaaatctgatccattttggcataaattatagacggcttgatggaacaatgaccctttctgcaagagacaaagctgtgaaagattttaacaccgatcctgagatagtcgttatgctaatgtcattaaaagcaggaaaccttggtctaaacat

SEQ ID NO: 264 - DNA, 579 bp, Eucalyptus grandis
agtgaattcggtggggagttaatgaatccaagaagcaactggctaattgtatataatgatgatgagggtgacatgatgcttgttggggatgacccgtggcaggaattttgtggcattgtccgaaagatttttatttatactagagaggaggttcaaaagatgaagccagggactattagtgccaaagatgaggacaatttgatggtcgatgaaggggtgttttcaaagaaaatgacttcggacacgctgccttcggcgtctgacccaaagaactgttaaaattctctcatgtctgtgaggtctttaaagtcattggagaagcctaatccagccgctacagttccctgatgctgaaattcatctttgtccacggggactgcacataatcttctctgtctatatcctctgtgcttcagtgaccattttctgccccgcaaagccgtatttgtatcatcaatgggattcttggatttggcttcaagatgcatggccccctgaggaggccagagagcctgacagagaactacggcagattgaaaaggagagaaatgaggcctgttcgtattcagcattttgaga

SEQ ID NO: 265 - DNA, 366 bp, Eucalyptus grandis
atcgaggccctgaaaaaacggttggacgatgtgaatgccaagtatgcggtctcggtcgagttcaccaaggccatggcactgaaccacctcaagaacggcctgcctcgcgtttttaaggcattgatggaattctcaggtgcttgcactaaggtattcgaggctttgaataacccccgcgagcaggtaggcagtcgtgagaatgagccgcgggttttgcctgcgtgatttcatggatgcctcaggccgtgtgtataatttgtttcaacatttggtaaaccttgataaggtgtcattgcatttgcatagaaatactgtgaaattcttttttaattttggtttgatcttagcttgaaaaaaaaaaaaaaa

SEQ ID NO: 266 - DNA, 376 bp, Eucalyptus grandis
gcagattctccccccgaacgccaagatctcgaaggaggcgaaggagacgatgcaggagtgcgtttctgagttcatcagcttcgtcaccggtgaggcctcggacaagtgccacaaggagaagcgcaagaccgtgaacggcgatgacatcgtctgggcacttgggtccctagggtttgatgactatgccgagccgctcaagcggtacttaaatcggtatcgggaggtcgaaggggagagggccagccaaaacaaggtcacaggcggcgaatcaagaaacgagaagaacttgtacggggatgagtcgccggagaagcagctgggcgctgcctcttcgtcgcctctgaagttctttgatgtggccgacaggagtaccaat

SEQ ID NO: 267 - DNA, 341 bp, Eucalyptus grandis
gtcaactcggtgttcgagctgcacaagctgctggcccgcccgggggcgatcgagaaggttctgggcgtggtgcggcaggtgcggccggcgatcgtgacggtggtcgagcaggaggccaaccacaacgggccggtcttcgtggaccgcttcaacgagtcgctgcactactactccaccttgttcgactccctggagggctgcgccagcacgcaggacaaggccatgtcggaggtctacctcgggaagcagatctgcaacgtggtggcgtgcgagggcgccgaccgggtcgagcgccacgagaccctcgcccagtggcgggtccgcctcggcggcgccgggtt

SEQ ID NO: 268 - DNA, 343 bp, Eucalyptus grandis
tcgctgttcaatacctccaagtcgaacaagcacctctgggagcagatctcgtccaagatgagagagaaagggttcgatcgttccccgaccatgtgcacggacaagtggaggaacctgctgaaggagtataagaaggccaagtaccaggatagaggatccgcgaagatgtcgtattacaaggagattgaggagattctgagggagaggagcaagaataatcagtataagagtccgacggcctcggctttgaaggtcgatccctacatgcagttttctgacaaaggcattgaggatgctgggatgactttcggacctgtagaagcaagtggtaggccgactctca

SEQ ID NO: 269 - DNA, 546 bp, Eucalyptus grandis
atgacctcgaactaaaagtgcgagaactggaaactgtcatgctaggacccagctcagatatgccccacacggttgatatcaacttcttggttggatctggccagatgtctcaggagacggagacattgatggagattatctccaggagggacctaaaggagattctctgtgcttgtgctaaagcagttgaagacaacgacaccttaaaatttgagtgtttaatatcagagttacgcccgatggtgtctgtttccggtgacccgatccaacgattatcagcatacatgttggaagggctcatagcaagattggcaagttcgggaagctctatttacaaagctttaaagtgcaaagagcctgctggtgcagagctgctatcgtacatgcacattctctatgatatatgtccttatttcaagtttgggtacatgtcggcgaacggatcaatcgcagaagtcatgaaggacgaaaacattatccatataatcgattttcagattgctcagggaggccagtggatcaccctgattcaggctcttgcagcac

SEQ ID NO: 270 - DNA, 283 bp, Eucalyptus grandis
ccccattttcccgtttctcccatattcctcaagcactctcatttagggaatgagtgcttagaagccacctcaagtttcaaatttttttcctgcgcagttctcaattcaaatggcacgtagctcatgtaatcagaaactgaggaaaggtttatggtcgcctgaagaagacgagaaactgttcaattatataagtagacatgggttgggatgctggagttcggttccgaagctagctggtttgcagagatgtggaaagagttgcagattgaggtggatcaactat

SEQ ID NO: 271 - DNA, 377 bp, Eucalyptus grandis
atttcttcctggttcttgatagaagattgaaggttctagaacaagaggaagaaagctagtgcaaaagaaagaaagtaaaaagaggtatttctgctgctttattagtttattgtggagtatggcaagtggaatggagaaccggggggaaattcctgcgaatttgaagaaacagcttgctctggctgtgagaaaaatccaatggagctacggaatcttctggtccatctcaaccagacagcctggggtcttggagtggggtgatgggtactacaatggagacatcaaaaccaggaaaacaattcaagctgtggaacttaatactgaccagattggtatgcagagaagcgagcaactgagggaactatatgagtctctat

SEQ ID NO: 272 - DNA, 548 bp, Eucalyptus grandis
ggaatatccagaggaatgagtaccataatctttttaacttcatcagtgggaaggggttgaagatcatgaacttgggagagcagggcgctgatggagtaccaggcgttcttgatgtggatgacgacgatgctgtcgatccccatcttgagcgcatcaggattgaagccggtgtagatgaaagtgatgaagaggatgaagattttgtcattgataaggatgatggaggatctcctactgatgattctggagatgacgagtccgatgtcagtgaaagtggagatgagaaggagaaagagaagtatgggaaaaaggaatctcgaaaagaagtcaaagcatcatcaagcaagaagaaagcaaaagctggagatgaagaggggtcgaagaagaagaaacagaagaagaaagaccccaatgcaccaaaaaaggctatgtctggttataactttttcttgcagacggaaagcgagaaaatgaagagaactaatcccggtctttcctttggggatgtatcaagagaaattgcagacaagtggaggggtttgtcagcg

SEQ ID NO: 273 - DNA, 420 bp, Eucalyptus grandis
tctctctctctctctctgtgaagatcctctctagcgataaatcactgttgcccatttcttccttggctccgttctgttgcttcctctctctgtcttcgacacttcaactgtgcgagcccaaaaatcgatccttttctgcttccttttgcctctgttccaagagtcaattgatactgggtcgatctggtcggcaacttttgttggaagtttgaggaatctgattgagagaagaggtagatctaaaggatcaaaaggatgtcatttaccggcacccaagttaaatgcaaggcttgcgaaaagacagtttatcctgttgaacagttatctgcggatggggttgcataccacaagtattgcttcaagtgcagccactgcaaaggcacattaaagctgagcagctactcctcaatggaaggagtt

SEQ ID NO: 274 - DNA, 454 bp, Eucalyptus grandis
gataaatcgtcttcaccagtacctccgcaggatcagacgggtgttcatgtttatcatcctgattgggctgctatgcatgcatactatggtccaagagttgctcttccgccttattataattctgctgtatcatctggtcatggtcctcatccctacatgtgggggccaccacagcctatgatgccaccatatgggccaccttatgctgcaatatactcacatggaggtgtttatggacatcctgcaattcctcttactccgactcccttggctgcggaaactcctaaaaagtcatctgctaattctgataatggactggtgaagaagttgaaaagttttgaagggcttgcaatgtcaataggcagtgggggggatgcagacagtgctgacgatgggactgataaaaggtcatcacagagtgcagactcgggagactcaagtgatgaggatcaat

SEQ ID NO: 275 - DNA, 620 bp, Eucalyptus grandis
gcgatttaaacagctactggaggaggcatcacaggatattgatcacacaactgactattacacttttagaaagaaatggggcaatgatccacggtttgaggccttggatcggaaagatcgagagaatttattgaatgaaagggtcctccctttaaaaaaggctgctgaagaaagggctcaagcaatgcgtgctgctgccacttctagttttaaatccttgcttcgagatagaggagatataactgtcaattcccgttggtccagggtaaaggatagtctcagggatgacccaagatacaagtcagtgaagcatgaagacagggaggccttgttcaatgagtatatagctgaattgaaggctgtggaagacagagaagaaaaggaggcaaaagctaagagggaagagcaggagaagctgaaggaaagggaaagagaattgcgaaaacggaaggaaagagaagaacaagaaatggagagggtacgagtgaaaatacgcaggaaagaggcaattgcatcttttcaagcattgcttgttgaaacaatcaaggaccctcagcttcctggacagagtcaaaagttaaacttgacaaagatcctcaggacgtgcgagtaatcctgat

SEQ ID NO: 276 - DNA, 340 bp, Eucalyptus grandis
gagataaagaactactggaatacaagaattaagcgactgcaacgcactggcatgcctatatatccaactgaggtttgtctgcaagtgtcaagtgagaatcaagaaactcataacatgggtaacttgcatactgcaggcgaagataattgtgatctctcacaggcagatccactcgagatcccagaggtggattttagaaaactggaactgcatcttggtttctcgtctttttggtctacacttctggacgttcctccttgtggctttgggagagaggcaatgtgtctatctgatgcttactgccttccatttccatcaagccggtctcctaaacgccttc

SEQ ID NO: 277 - DNA, 351 bp, Eucalyptus grandis
cgacgacccgcatacccgctgccaatctggaggacctatttgacaaccataacatggctcgaatacgggacgtatgggccccgaatcttgagatagagatgcagaacatccgcgaggccatcgagaaatactcgtatgtttcaatggacaccgagttcctgagtggggcgcggcccataggtaacttcaaaacgtcctcggactaccactaccagacgatgcgctgtaacgtcgaccttctcaagatcatccaagtcgggatcacgctggcagacgaggaggggttgttcccgcaggactgctctacgtggcaagttcaactttaaatttagtctttggcgacgacatgtc

SEQ ID NO: 278 - DNA, 337 bp, Eucalyptus grandis
gcagccgagtcgagcaagaaactaacgaacgcccggtgtcattaggattcataatccacaagaacaaaagaaaaaaggatcatgggaagatccccatgttgcgaaggcaatggcctgaagaaagggccctggtcttctgaggaagacaagaagctccttgattttatccagcagcacggccatgggagctggatctctctccctaaacgtgcaggtcttaatagatgtggcaagagctgcagattgagatggataaactacttgtggccggacatcaagagagggagtttctccccggaagaagaacaaaccatcttgcatctccactccgtgctcg

SEQ ID NO: 279 - DNA, 383 bp, Eucalyptus grandis
ctccaacgcgcgccttcttctcctggactcctctgagctctctccatctcctccggctcggcgcggccgtcgctcgacggcgacgactcgagggtttccatataattcacttgaaagaagctgcagaatgccgtggaaaacaggacttaccggctctaaaacggaagaagataaggctctgcagctttgtcgggagagaaaaaaatctgttaggcaagctgttgatggttggggctcccttgtgtatgcacatttcatgtttgtgcaatcattaaggaacgtagggacagctctcacaaagttctttgaaacagaatctccaaatgggtctccctcgtatgcctcaatgagtacaacacctgagccaatcgcattaaccgaga

SEQ ID NO: 280 - DNA, 312 bp, Eucalyptus grandis
ggtttgctcagatgcagcaagagctgcaggctcagatggactaattacctccgtcccggtatcaagcgcggtagcttcacggaccaagaggaaaagatgatcgtccaccttcaggctcttcttggtaataggggggcggccatagcttcgtaccttcctcagaggactgacaatgatatcaagaactactggaatacccatttgaagaagaagctgaagaagcttcaaggccaagcaaatcctgatgatgatgaccataatcatcacccacaagggttcaacgcaacttcacactccaaccccaagggccag

SEQ ID NO: 281 - DNA, 311 bp, Eucalyptus grandis
gagatggcgaggacaccatgctgtgagaagatggggatgaagaaagggccgtggactccagaggaagaccagatcctgatctcccacatccaccagtttggtcactcaaactggcgtgcacttcctagacaagcaggtctgttaagatgtgggaagagttgcagactccggtggataaactacttgcgacccgacgtgaagcgagggaacttcaccgacgacgaaagagacaccatcattgaacttcatcaagttcttggcaacagatggtcggccatagcctcgagattgccggggcgaacggacaatga

SEQ ID NO: 282 - DNA, 378 bp, Eucalyptus grandis
catggacagctgaagaggacaagaagctcatcaacttcatcctcacccatggccaatgctgttggcgggctgttcccaagcttgctggactgctgcggtgtggaaagagttgcaggctgaggtggaccaattacctgaggccagacttgaagagaggccttttgtccgagtatgaagagaaaatggtcattgacctccatgcgcaacttggcaacagatggtcgaaaatagcctctcacctcccgggaagaacagacaatgagatcaagaatcactggaacactcacatcaagaagaagctcaagaagatgggcattgatcctctcactcacaagccattagtcaccaacaacgacaacacaaccgatcaacaacccc

SEQ ID NO: 283 - DNA, 389 bp, Eucalyptus grandis
ctccctcctcctccaaacgtttccgtttctctccaagctgaacatggacaagaagccagacgacgacagtggtaagtcccaagatgtcgaggtgagaaaagggccgtggacgatggaagaggatctcatcctcatcaactacatagcgaatcacggcgaaggcagttggaactccctagccaaagctgctggtctaaaacgtaccgggaagagttgtcggctccggtggctgaactatctgcgacccgacgtccggagaggcaacatcactactgaggagcagctcctgatcatggaactgcatgccaagtggggaaacaggtgagatgcacataagtcacacaacttttcgttacataggttctacaacataatacccatcgatcata

SEQ ID NO: 284 - DNA, 385 bp, Eucalyptus grandis
ccaatggtgacagtgttaaggatgaccttgatacagatgaatatgaaactcatgccacagttttggataagctattagcatgggagaaaaagctctacgaagaagtgaagcaaggtgagcacatgaagctagagtatcagaaaaaggtggctttgctaaacaagcagaagaaacgtggtgctagtggtgaatccctggagaaaacaaaagcagctgtaagtcatttgcatacgacatacatagttgacatgcagtccatggattcaactgcttcagaaataaaccacataagggacaaacagctgtacccaaagcttgcgcaacttgtcgatgggatggcgaatatgtgggaaaaaatgcgcatgcatcatgataagcaggagtc

SEQ ID NO: 285 - DNA, 461 bp, Eucalyptus grandis
caccggaaacagtccatgttcagaattattctccaattcatcaaatgggcattgatggattctttccagcgcatccctccccacagaatccttcgtaccattcttactcccccaacaatagacccaatttccctcctccgtcccctcaaacttcacagtgggactatttttggaaccccttttcatccctggactactatggataccccactcggagtagtattgatcatatggctatggatgatgagaccagaggattgaggcaggtccgagaggaagaggggattccagacttggaagaagaaactgagcacgaagaatgtgatcaccactcgtatgttgatgaagatagaggcaacagagatgctaatttccccactgaggaagttttagtggaagatgttgatgacgaggaagaggatgaggatgaaggaaacagacacagctgtgaatctgaggat

SEQ ID NO: 286 - DNA, 438 bp, Eucalyptus grandis
gtactgcgggctcagctgatggaattgaccgacaggctgcggtccttgaattcagtgcttcaggtcgtggaggtggttagcgggctcgccatcgatatacccgagatacctgatccgcttatgaacccatggcagctgccctgcccgatgcagccaattacggcgtctgccgacatgttgcagctgtgagcatcagattggaagtgtaaaagttggggctgattcttttggagtccccttctggggggatggtagatccatagccatttgctgcttttgtttttcttgtcaattccgttctctttcttgaagttggaactccaatatctgtatgcgtctgtctagatggactggcgcttttatgtctgcttgacattgtacttggctgttcttgcttgttacttatgggatgttcctgttctaaaaaaaaaaaaaaaa

SEQ ID NO: 287 - DNA, 405 bp, Eucalyptus grandis
ctgaccttaacagctgcaagcactgttatatttgcagagctatcgtggacaccgggtgatctgatccaagctgaagatcgtgctcacaggattggtcaggtatcttcagttaatatatattacctgctggcaaatgacactgttgatgacataatatgggatgttgtccagagcaagttggaaaatttgggtcaggtgcttgatggccatgaaaatacattggaagtctcagccagccaaccaactagaaacagccctgcaaagcaaaaaacctttaatagccctggcaaacagcatacatttaatagccctgggaagcagcaaaaatttaatagccctggcaagcagacaacactcgactcgttcatgaagcgttgcaatagtggtgacccctctgaacatcag

SEQ ID NO: 288 - DNA, 515 bp, Eucalyptus grandis
ccctcttcctcttcctctccctctctctgtcgcagagctccgtctgaactcgcagaatccacgcgcagagcgacccaagagtgtttcagaacagtccgtccatggccttggaagctatcaactctcccaccgcggcctcagcgccgttccagttcatggaggagcccttgagctcccgcttcttggagcccctgaacaagcgcaagcgctccaagcgcccccaccaccctccctccgaagatgagtacctcgccctctgcctcatcatgctcgcccgcagcggcgccgcccccaagcccaaccaccacgcctcgcccgctcctcttcctcctcctcctcctcctgcgcccactaagcctgaagaagccgcggcgaccgccacggcaaccgcggccccggcgaataacttgagctacaagtgcgccgtctgcggcaagggcttcccctcctaccaggccctcggcggccacaaggccagccaccgcaagtcggccgccgccgccgccgccgccgcc

SEQ ID NO: 289 - DNA, 375 bp, Eucalyptus grandis
ggcaattgctcttgtcctagccaaacgggaaatcatccgtagcataggcactggattggactggtcctcaccttcggcaggttcatcgacaagtttgcctgaaattaaaggaacccttgtcatatgtcctgtggttgctgtgactcaatgggttggtgagattaattgctccactgcccaaggaagcactaaggtcctagtatatcatggagcaaatagaggaaagactgctgatcagttcaagaactttgattttgttgtaaccacatattcacttgttgaaggcgagtacagaaaatttgtgatgccacccaagaagaagtgcatttattgtgggaagttgctttacaaggagaaaatgacagttcaccttag

SEQ ID NO: 290 - DNA, 590 bp, Eucalyptus grandis
cccagatttaccaggagatgacttagcattggaattcgaggaattcgatttccagagcctgttcgacgaattatcgcctgatgccgcgggccttctcgacgccagcgatgtcgatgcttcgtctccgggatcgctgtcctcgtggatcggcgagatcgagggcatgctgatgaaggacgacgaggaagccgtcgccgtcgagccgagtcaggaggtcttcgatcgcttcttcgccggcttgctcgttgattcccccgagggcggaccggccgaggcgaccgacggcgcgagcgacaaggagtccaattcatccgacggcggcggcggcggcggcggcgaacgggatgagaagctggtcgtcggagataacgagctttccgaggacgctgatgatgatgatcccgtctctaagaaacagagaaggcagctcaggaataaggatgcggcggctaggtcgagggagaggaagagaagttacgtgaaagagctggagatgaagagcaaatatatggaaggggaatgccgcaggctggggcggttgctccagtgctttgtggctgagaatcaagctctgcgtctgaatttggaga

SEQ ID NO: 291 - DNA, 307 bp, Eucalyptus grandis
gtgatttcgagtcagagcatgcaccttggagttcttgcaactgcctcccatgctgtcacaactcaaactctgtttgtagtttattacaagccaaggactagtcaattcatcataagcttgaacaaatatttggaggctcttaacaataaattcacagttggaatgagattcaagatgagatttgagggtgaggattctccagagagaaggttttctggtacaattgttggggtggaagatttctcacctcaatgggataattcaagttggcgatcattgaaggttcactgggacgaacatgcgtcat

SEQ ID NO: 292 - DNA, 209 bp, Eucalyptus grandis
gttcaatcagctcgacccgaggatcaacaggaagcccttcagcgaggaagaggaagagaggctcttgactgcacacaagctgtgtggcaataaatgggccatgatcgctcggctcttccccggccggacggacaacgccgtaaagaaccactggcacgtgatcgtcgcgaggaagcagagagagcagtccaacaacgcccgcggccgga

SEQ ID NO: 293 - DNA, 224 bp, Eucalyptus grandis
ctcagaagtacttcatcaggcaatctaacgtgtcaaagagaaaacgacgttccagtctgtttgatattgtggcagaggaatcggttgatgtgccaatgggatcaagggacttctttgcggtcgacgagcaacagcaggaaacagaagtaaatgatgccttgcagcagctgccacctgatgttgatgaagaatgtgaatctatggactccaccaactcaaatact

SEQ ID NO: 294 - DNA, 185 bp, Eucalyptus grandis
ttcttcttcttctagacatgaatctcgacatccaatccctcttctaaccaatgggcagccgatgtctggtgaaatcccctgtgctagtattgacagcccatctgttaggactacatctggacctctgggtccttttgataaacatgtgcactcgcttccctatgttgatcccagacagccagttc

SEQ ID NO: 295 - DNA, 428 bp, Eucalyptus grandis
tcagcccgcccctctccgcccacgtggccagccacaaggggctccatcaagcgagcaagcccaagatccacgagtgcaacatatgtgggtccgagttcgcgtcgggtcaggccttgggcggccacatgaggcggcacaggtccgccccgccgccgacggccaccagcgccgacgcgacgagccccaccaacccgccggctgctgcggccatcaccaccgagaagtcccgcaacatcctctccttggacctgaacctgccggccccgaacggaggaggatcaccaccaccaagcgcaccgccgccgggagaactcgaagttccaattcgccacaagtcaacagcccatcatactagcctcgcccgccttggtggattgccactactgaaaaaaaaagaaaagacgggttcacatgtcaatcaatgtaac

SEQ ID NO: 296 - DNA, 418 bp, Eucalyptus grandis
gcagtttcggatattaatttggtttccaatagcacacatagttcatacgaagatgggggaagcccacggagaattacatcagaaagtgaccctaaagatgctccaatgggaactgagagccttttaagtgcacctgaagcagtagagctttcagatacagggacttccttcacgttcaagatggattcatctatgcaaaggaaaccaccagtagatgaaagcccaaggatgcatccgttgcccatgaatctaactactgaagagggagataacaatgtttcgtgccaactaaatctatctcttgcatcttctctactgcaagttgaccacagtcaacaattcaatcgtttgaatgtgctaggttcagaaactagcaagtctccagatgcaaggtcaaatgccagcatcacagaatctg

SEQ ID NO: 297 - DNA, 250 bp, Eucalyptus grandis
tgcacccagagtataactcgagtccagtgggttacatggagaccaacaaggctcgtttggtgttggagaaggacgacttagggttgaatcttatgcctccttcgacttgttaaggttcttggcgatgattatgatatgatgatcagtttttcctgcattatttgaagaagctgaggctgaggtttcttgtcttttctttttcctttttgttatttttgaagaggttttcttttctctatttcccccccca

SEQ ID NO: 298 - DNA, 626 bp, Eucalyptus grandis
agaacataggtgcgaaggccgatgtgttccacatactctctggcatgtggaagacgcccgccgagaggtgtttcatgtggttgggcggtttccgttcatctgaacttctcaagatactagggaaccacctggagcctttgacggatcaacagttgatgggcatatgtaatctgcagcaatcttcacaacaggctgaagatgctttatctcagggaatggaagctctgcagcaatctctcgtggacacactttcttcgaccacactgagtcctactggttcaggcaacgtcgcagaatacatgggccaaatggctattgcgatgggaaagttggccactctcgaaaacttcgttcaccaggctgacctcttgagacagcagacgctccaacagatgcatcggatattaaccacccgccaagcagcccgcgctcttctcgtcatcaatgactacatctcacgtctccgagctctaagttcattatggttagctcgtcctaggactgaaaacatctgttctgctaaactcttctgatgtaatcgatagttttgattgaaattaacgtttctagtggggatccatttactgcgactgtagcgattcgggccacatttatataaaagctat

SEQ ID NO: 299 - DNA, 438 bp, Eucalyptus grandis
aaagaagagactaatggtcgcatctgcattcggagaggacgagaaagcgggtcgtcaaacccgcctaacggtggaggacttgaactacttgtttatggcgtgattcggaaggtctaattttgcggatcgcaacacatcatttactaaccttagtgctgcctggtagagtttgttctgagtagcggcagcggccttatacttagtgatttcgacagaagcgattggctggagattgatcaactttcctgcttcaccattatttgttactgtacagcgcgcgacagatagcaacatctaacagtaaagatgcaatttttttttcccctgaaaatgtaaatgatatagggtttttgttctatctctgtgctctcctccattccttatttgtatacggagatcacaaacttgaggtcagtgaatttgataattatgtcttgc

SEQ ID NO: 300 - DNA, 345 bp, Eucalyptus grandis
ctctcgttcgcgttctccgtctcatccttccttttgccggtgggtttccggtcgagatagcggagggttcctgattcagagggcggcggcggcagcgacgacgaggaggagctccgacctcgaagcgcttcggtccgattcctcccttgcggtcgcgcgtgtctgacggacgagtcgttttttggcgggagatgagagatctgtgcctcgaccagagagaaatggcgtcggggagctccagggtcgaggcccgagctgatgcggagatggcgctctacaacgagctctggcaagcctgcgctggtcctctcgtcgccgtccctcgtcaaggcgagcgtgtcttct

SEQ ID NO: 301 - DNA, 454 bp, Eucalyptus grandis
catattttcatgctgctacgccccgtcctttggcctgcatccatggccaatcagccacccggtgagccccaaccaaatccgccaccgccaccgccaccagccccagcgatccaaatccctgaccaaccaccgcataattcgccttcttcttcttcttcttcttcttcttcttcttcttcattggccaccaccggtgatcggggcggttcctcgcctagaccgatgctttctccgagcgggtcgtcgccgctggctcaatccacagggaggcacccgctttaccgtggagtccggtcccgcagcgggaagtgggtctccgagatccgcgagccccgcaagaccacccgcatttggcttgggacatacccgaatcccgagatggccgccgccgcctttgacgtggccgcgctggctctgaaaggctccgacgccgccctgaacttcccccatgatg

SEQ ID NO: 302 - DNA, 286 bp, Eucalyptus grandis
tttcccgcaagggcacatggaacagctggaggcatcgacaaatcaggaactgaatcagaggattccgctcttcaacctcacttccaaaattctttgccaggtcgtgaacgtccagctcctggcggagcaagaaacggatgaggtttatgcacagattactctaattccagcgggaaatctaatggagcctacaagtcccgatccagtctctgcggaaactccaagaacaagagttcatagtttctgcaaggttctaactgcctctgataccagcacacacggtggc

SEQ ID NO: 303 - DNA, 513 bp, Eucalyptus grandis
cagaggacaaggtaaaaaaggggcagccctctgctctgtctgaattgccgtctctccctacttctctgggcttctttttctttgcttcccttccttaaactctccctctccccgtttcttgtctggtttttctgggtgctctcgcttttcgctgctgaaggagtgagtttgaccgtcgggttcctttcttgatcctccaattcgatcgtcagctcctcgtgtcgacttttttcgggtttcctgtcggcactgttcgattcggattcctcgacggaatggggagtaacatcaacttcaagaacttcagcaccgatccgacgccgacgaataacaggcctcctggcaacacgctgttaacccggcaaccgtcggtgtacacgctgacctttgaggagttccagaactctataggcaaggactttgggtccatgaacatggatgagctcataaagaacatttggtctgcagaggagaaccaatctatggcatctgctagtggcgcttgtggtggcg

SEQ ID NO: 304 - DNA, 370 bp, Eucalyptus grandis
ggcgattgcatgcttcccatgtgtagcatggtgtcagatttttgaactgttaattgcatgtgccgcaatcttcattcctatcaattgagcacttcaacaggctttttctagtgggaagaagtctccaacaaacatgacataggggatattctggaaatagttatgaaagaggagaccccgtttctaataaggaacttccatgcaggcatgtggatcgtacgaatattctgagcaataccatgatgaagttaagccagcatatggacctcagatatcggcacattctcagtatctcgggtacaattccttgagattggggttgcctctcagagtggcggaggaacctgtttatgtgaatgccaagcagtac

SEQ ID NO: 305 - DNA, 503 bp, Eucalyptus grandis
gcccgatgtccccctcccctcccccgccggagacgtgaccgatgccgagtggttctacgtcatgtccttgacccgctctttctcggcgggagacggtattcccgggaaggccctcagcacggggtccttggtctggctgaccggtgctcgcgagcttgagtcgtacaagtgcgaccgggccaaggaggccgagctccatggcatccgcaccatggtttgcatcccgactggtgatggagtccttgaattggggtcttgcgatgtgatccctgaaaactggggccttgttcaacgagccaagtctcttttcggctccgatctgctccttcccaagcacccgccaccgccaccacctccgttccagctccaccatgaccatagcgacatttctttcgctgacattggaataattgcgggcgttcaagagaatgatttcgctcctcacgatgaccacgagaagaaggtcaagaagaagcagccgctggtggaaggagctggcggga

SEQ ID NO: 306 - DNA, 377 bp, Eucalyptus grandis
atgtcgctggaatgacgcgaggccgtcgtgacggcattctgaagagcgagaagacgcgacatgtcgtcaagattggccccatgcatttgaagggcgtgtggatcccttacgagcgggctctcgagtttgccaaccgggaaaagatcaccgagtatctctacccgctgtttgtgcatgacattggcgcgctgctctatcatccgagcaaccccagcggcgccaccagccgtgcgggcaacgcgcagaacacgcttgccgccatcgatcgtcgcaggaacgaggcgcgcatggcggcaagcatccaggggcaggcggtgagcggagtattggtctctcccgtcgcccagaccgcaggcggccgacccagcgtcgaccgc

SEQ ID NO: 307 - DNA, 361 bp, Eucalyptus grandis
aataatctctctctctatgacaatggagtgggtagtacaccacgccccaggtcaaatgctgaacagttaattttccgagcggcattgcaggatctctctcagccaaaatcagaagaaactccacctgacggtgctctggcagtacctcttttgaggcatcagaaaattgccttgtcatggatggtgaaaaaggaaaccgccataaattgctgtgggggaattcttgcggatgatcagggactagggaagacagtatcaactattgctcttatacttaaggaaagacctccaaccttcaaacaatgtcaggagaatccaaagcaggagttacaaacttttgatttggatgaggatgaaaatg

SEQ ID NO: 308 - DNA, 357 bp, Eucalyptus grandis
gccctctacctctccccctccctctctccctctacacctcgctctcgcttcatgatctgggtggacagagggtgttcccgcatagatccatcactcgctcgtgttacttcggcgcaaaaaaggctttgttttgggacctgggtttgtgtcgattggtcgtttttgtgaactcccgaatagtgatgtcgttgtcggccaagagcgagtcgattcaaattcgggacgtgtgggatgataacctcgacgaggaattcgcgcgaatccgcgagatcgtcgacgattatccgtacgtggccatggacaccgagttcccgggtatcgtcgtgcgccctgtgggcaacttcaagaactccagtg

SEQ ID NO: 309 - DNA, 433 bp, Eucalyptus grandis
ccgcggtcttctttcttccaaagtaaactcaacttcttccttcctccccaccggcaagaaaagtctccccgatcctctctcgccattcccggcctcgccgtccggctgaattgtcgacgttccggctcgctccggcgccgactggaggccatggcggattcggacaacgactcggggggccacaacaacgcgaacagcgagtcggcggcggcgctcgcccgcgagcaggaccggttcctcccgatcgcgaacgtcagccggatcatgaagaaggcgctccccgccaacgccaagatatccaaggaggccaaggagaccgtgcaggagtgcgtgtcggagttcataagcttcataacgggggaggcgtcggacggcagcagcagcatcggcggcggcggcgggggcgtcgtgaacagcggcgggggctccgcgg

SEQ ID NO: 310 - DNA, 511 bp, Eucalyptus grandis
ggaagatcaatccagatcgatgggagtttgtgaaccaaggttttcagaaagggaataagcacttgctgaagaatataaagaggagatgcaaattcagtgagcatagaaaaacatcgagtagtactgtcacctctgattaccagaaagctgaaaatgaagtggaactcaacacgcttaagaagggccaggaagtgttgaagaccagatcccttaaactaagagaagagcggaagagctttcagcatgagattgagcaagtcgcagagcgggttcgccatgctgagtgcaggaaccagcagatattcctcttcctcacaaaagcagccaaaagccccaactttgtccatcatttaatccagaagaagagccagaagagagatttagagacttgtgaatcaagcaagaagagcaaattgcttggttccgatgctgaagccaccaaattcttgaatgaagcaatggatcacatgattaaaagcccaaacgttgattgcctgagaatcagtgatga

SEQ ID NO: 311 - DNA, 799 bp, Eucalyptus grandis
ggaattcttgcagctgcagctcatgctgcggcgaacaacagccctttcactatattttacaatccgagggcaagtccttctgaattcgtgatccccttggctaagtacaataaagcattttatactcaagtttctcttggcatgagattcagaatgatgtttgagaccgaggagtcgggagtccgaagatacatgggtacaatcactggaattagtgatttggattctgtgagatggaaaaactcccagtggcgcaatctccaggtggggtgggacgagtcgacagccggtgaacgaccaagcagagtttcaatgtgggaaatagagcctgttgtaactcctttttacatatgtccacctcctttttttcggcccaagtttcctaggcaacctgatgatgagtctgatgtagaaaatgctttcaagagggccatgccttggcttggagatgagtttggcatcaaggacacgcctaactcaatcttccctggcttgagtttgatgcagtggatgagcatgcagcagagtaatccacttcaagccactcaatctggacttctacctccaatgctttcttccactggtttacacaataaccttggcatcgacgacccctccaaattgctaagtttccaagcccccacccaaggtcttcaatttaataaaacgaatccacaaaatcaagtcagtcaattgctgcaaccgtctatggcttggtctcaacagcaccagcttcagcaactgttgcagaatcctctgggccaccagcagcagcagcagcagcagcagctgcagcgcc

SEQ ID NO: 312 - DNA, 304 bp, Eucalyptus grandis
gtaccttccatgaaaccagaatatccggttccaaatggaattggagcatcggactttggggaatctttcaggttccagaaggtcttgcaaggtcaagaaaacttgggttttggcactccttacgatggtatcgaaactcaaagtcatcggctatctgaagtgaggaggcatcatcctgatgattcaggtggttctgaagctgctgccaccagaaatggcatcacaaacccatccgtgaatgctagtgtcacttacaaaggcatgggctttggcgaatctttccggtttcgtgaggtcttgcaag

SEQ ID NO: 313 - DNA, 427 bp, Eucalyptus grandis
cccccctctccccttctgcctccgccctcgatccccaaaaccctcctccgaatcgattccggcagccccctccggccaccgccccctcccgccgcaatggacgcagcgccgccgggcggcggcggaggcggaggcggcccggcgccgttcctcctgaagacctacgagatggtggacgacgcggggacggacgagatcgtggcgtggagctccggcaagacgagcttcgtcgtctggaacccgcccgagttcgcccgcctcctgctccccacctatttcaagcacaacaacttctccagcttcatccggcagctcaacacctacggattccgaaaaattgatcctgagcgatgggagtttgctaatgaagaatttgtgaaggacaaaaaacatcttctcaaaaacatccaccgtagaaagcccatcc

SEQ ID NO: 314 - DNA, 308 bp, Eucalyptus grandis
ttcaagatgtaaagggaaaggaagtgggtgtttcagttcagattttggcccaataataacagcagaatgtacgtgttggagggtgtaactccttgcatacaatctatgcagttacaagctggagacactgtaacttttagccgcatggaccctgaagcgaaacttataatgggtttccggaaagcatcaacctctatgatgcaggacagccaactagctgctgtttctaacggtaaccattcaagtgaagctttgatttctggtggttttgaaaatgtacctatgataagtgggtattcgagtctcct

SEQ ID NO: 315 - DNA, 92 bp, Eucalyptus grandis
agaactggaaaggctgaatcagagtgtctttgtccccgtaatagtgggctgctggatgcgttagttcacgagtcgaagactatgagcagtgc

SEQ ID NO: 316 - DNA, 764 bp, Eucalyptus grandis
agagagacgaccggacggtggaaaagagagagagagagagagagagagagagagaagattgcgatgtagccggcgacgatcctagaatctgaagctgccgagcctaggccgtcgattttcttaagcccgttcttggtgctgctgttgccgttgctgttggtggtggtggtgctgctgctgctgcagtgattgcttcttccagctttttctgtggcggaatagagctgcagctcgtcgggggctcgtctgctcccgctgttcccttcccctccccgtctcctgagtagggttgcggaagttttccggcggtccgtctgcgcaccaccgatcgacgaggaggcgcgctccgtcttcggattcgggacgccggggatatggcttctcacgaggtctccgtcgtggggagcgaccggagggagagggagaggacgggctgcgaggacgccttgtacaaggagctgtggcacgcttgcgccggtcctctggtgacggttcctcgcgaaggggagctggtttattacttcccgcagggcatatcgagcagattgaggcgtcgatgaatcaagtcgccgatcggcagataccgttttacaatcttccctcaaagattctctgccgtgtcattaatgttcaattgagggctgaaccagagaccgatgagctgtttgctcaagtgactttgcttccggtgcctaaccaagatgagactgctgtggagaaggaaactgggatcccctgcctccaacgaccccgtgtccattcct

SEQ ID NO: 317 - DNA, 181 bp, Eucalyptus grandis
acattcatggggatatgcagcctccaacattcatctcagcaggcggaggaggcgctgtcccaggggctagaacagctccaacagtcactcgtcgacaccattgccggcgggcccagcatcgaaggaatgcaacagatggcaatcgccttgggcaaattaaccaatctcgaaggctttgttc

SEQ ID NO: 318 - DNA, 420 bp, Eucalyptus grandis
ctattggttatcccaagatgccgttacaggcttcaatttctacacagtcggacttccaagctgatggttctggtcatggtgtgccaataccacaaggtgcagatagtggatcattaggcatttcagccttacccaccatacaaagagattcgggtgtgcatgttaagcaaacaacaagtgagtcatcgagggaggattcagatgatgaagaatttgaaggtgacacgggaaccactgaaaacaaagatcctgctgaagtcagacgcgccagaaggatgcagtcaaatcgggagtcagctaggcgatccagaagaagaaaacaggagcacatgagtgaacttgaaaaccaggttgagcacactggactactgaagcgtctcactgatatgaaccaaaagtatgatgtagcatcagttgaca

SEQ ID NO: 319 - DNA, 462 bp, Eucalyptus grandis
cggaaccggtggcaattggatcgctcttcctcgcaaagccgggcttaagcgctgcggcaagagttgcaggctaaggtggctgaattacctgaggccagacataaagcatggaggtttcactgaggaggaggatcacgtcatctgcactcttttctttaccataggaagcaggtggtcggtaattgcttccaaattgccaggaaggacagataatgatgtgaagaactactggaacaccaagctgaagaagaagctaatgaagcaactggcttctctgaaaacagtgcctgaaagtaactttgactatcaggtctgcgcacagaactcggcctcaatcgatcctgagaccaagaatcgggaatatgctgctaattcaatgggattccccaagcagaacttcaatccaggaatacccacttcgaactcgagtcttctctgtcctccaagtctcactgaagtttc

SEQ ID NO: 320 - DNA, 445 bp, Eucalyptus grandis
gcacttcttgcgcagacaattgcagactctctctctctctcattcaggcgcctgtcttctcaagcattttgtcaaagaaactcctttgttttttctctctttctctctcgaccatggcccgaccgcagcagcgatatcgcggcgtgcgccagaggcattggggctcctgggtctctgaaattcgccacccgttattgaaaacaagaatttggctagggacgtttgaaacggccgaggatgcggctcgagcctatgacgaggcggcaaggctaatgtgcgggccgagggctcggaccaacttcccttacaacccaaacatgtctcagtctcttcgtcgaagctcctctcggcgacattgacagcaaagctccacaggtgctacatggcctcgttgcagatgaccaagtctgcattgcaagtgcaagaaccacagaaccacccagtt

SEQ ID NO: 321 - DNA, 350 bp, Eucalyptus grandis
cgcgagccgcatcccgcccctccttccttccccgttctcgaattcgccgagatctgctgcggatcgcaccggcgcgggattctcgatggaggcggcggcggcggcggcgaaggtggtgggggaggcggaggagctccccaagaccatcgtgcggcgcgttgtgaaggagaagctctcccggtgctccgacgacggcgacgtctccctccacaaggacgccctcctcgccttctccgagagcgcccgcatcttcatccactacctctccgccacagcgaacgacatatgcaaagaatcgaagaggcaaactatcaacgcggatgacgtgttgaaggcgctggaggagatgg

SEQ ID NO: 322 - DNA, 263 bp, Eucalyptus grandis
tggcgatagccagttcatgagcaaggccagcttcgtggtgttgataggttggagggtagtcactgggtaccaattgggtgggaaaggatctcggctctcgcccaaactgtgcaagtagatgctggttgggggatgcagctagattcaatggatgacgatgaggacctgactgttgcagatatggagactccttactgggagaggcctgcagggccgatatggtggtgtcatttctcggcaggtcatcctgctgtggaagcatg

SEQ ID NO: 323 - DNA, 893 bp, Eucalyptus grandis
gttttttcccttttcgatatctctgcaaatctgcgactctctgctctcggctccaaccccctcctcttcactcttcttcacaatccctgtctcgcgaatttatggcgctacccgcacgacagtccgtcccttcctttgatcactagcaaatgtacgaccgaggattagcaacccaaaagctgtcgaattccatctgatttggtgcctctcatggtgtgaaaagcagaactgttctctcgtattcttggcatcagtacaactggctcaacatgctgttactcttactcaactaaaacttcagcaccacattgtcgttggccttaaagttacagctcagtaatgaaaccaaccattgatctggaagtggaggccgtctcggaaaatgactctgagattagtagccaagtcgcctccaatctatccaatcaagagccctccatgggtccctccaatgacagccttgctaactcttcctacctcatcagcccttcggctgttggatcaggttccgaaactgtgttcctagacttgagccttggttgcagcaatgatgagtccagcgggagggattctgtaggagtcgccttctcgagcaccagcgaatgtagcaatgagcccgaatctcatccggcagctgcaggaccaaccacttcaagagtcttttcttgcaattactgtcaaaggaagtttttcagctcacaggcactcggtggccatcagaacgcgcacaagagagagaggaccctggcaaagcgggcaatgaggatgggcatgttttcttcacagagatattccagcttggcgtctttgcctttgcacgggtctcccactgtcagggatctggggatcaaagcgcattcttccgtgcaccaggtgcaccaaggcatgttgca

SEQ ID NO: 324 - DNA, 434 bp, Eucalyptus grandis
atcacttcaacaccatgaccttacaaaaacaaagcaattgttagaaccatggttgctcaactgaagaacttcgatgctgcgctacaagaattggaggagaagaagaagaacgaagtcgaccctagctcgagcatcggttcgtggatgtggaaccctagtgccgcccaggaggatgatgactcgtgggaggtgagagccttcgccgaagacactagcaacattatgggcgcaacctggccgccgaggtcctacacttgctctttctgtagaagggagttccggtccgcccaagccctcggcggccacatgaatgtccaccgcagagaccgtgctaagcttcaccaatcacaattccggccgctggcgaaccaaaattctcctttcgcttcttgctcttccccgtcctcctcgactctgctattcccgaatcaaga

SEQ ID NO: 325 - DNA, 588 bp, Eucalyptus grandis
cctagctgaaactattactcccactggttctctctctctctctctctctctctctcaaacatggctgaattagattattgccaaaccaaaagcagccccggcgctgccgccacgcgcttaaagctcttcggcttcaacgtctccgatgaggaagactcagccgtcagcgaccccattactgttggcgcgaacggcggcggcggcggcggaggcggcaaggccacgccgtcgggctcgccggaaggcagcgtcccggtggggggcggcggcgagcggaagtacgagtgccagtactgctgcagggaattcgccaactcgcaggccctggggggccaccagaacgcgcacaagaaggagaggcagcagctcaagcgcgcccagctgcacgccagccggaacgccgccgtgtcgtcgctcgtccggaaccccatcatctcggccttcgctacgccgccgcacctgctggccaccgtggggccggtggtggtgacgggggcggcgcccacctccccgtcctgggtttacgttccgcgtggcgccccgcccttccaagtgtcgcacggctgcgtgttcacgaccggccaggga

SEQ ID NO: 326 - DNA, 417 bp, Eucalyptus grandis
ggaacatcaatcgaatccatggcatcagagctcctcagccgctaatcacaggcagctcaacctagagctcgcacttgagccatgttcaccatcctcgtcatcatcaccagcatcactccatcctcttgcagttcctgcaaaagacaacaagctttactcatgcaacttctgccaaaagaagttctatagctcgcaagcacttgggggtcaccagaatgctcacaagctcgagcgaaccctagcgaagaagagcagggacttgtgctctgccgcaaaacctcctgcggcgacctcgaatggtcaccatgtacggccatcttttcaatctgtggtttatgagaatcagccacgcttggccaggcatgttggggatgatatgaggtatgctgggactaatccgctgtatggttcatcttg

SEQ ID NO: 327 - DNA, 448 bp, Eucalyptus grandis
cagctgtcgtcggtggacagggaagcgagggtcctgaggtacagggagaagaggaagaaccgcaagttcgagaagaccatcaggtacgcctcgcggaaggcctacgccgaaacccggccccggatcaagggcaggttcgcgaagcgcgccgacatcgaggcggaggccgagcgcatgttcgggttcggggtcgtgccctccttctgatgtcatctgaagcgttggaaggtctctctctctctctctctcaagagagaaattttgggctcttttccttgctggttttgtgctgctgcttttctcttgcagcgatatcagtctgttttgtatatacagtaggagactgttgtgtgctccctggatctctgaccgttgcctgatcttgaatgttttatggtgaattttcatggaatttgatgatgcaaattgaagggaaatttgctgaaaa

SEQ ID NO: 328 - DNA, 673 bp, Eucalyptus grandis
gagaggtccgtggacggtggaggaggacctcaccctcgtcaattacattgccaaccacggcgaaggacgctggaactccctcgcccgcagcgcaggtttgaaacggaccggaaagagttgccggctgcggtggctgaattacctccgccccgacgttcggcgcgggaacataaccctcgaagagcagctcttgatcctcgagctccattcccgctggggcaatcgatggtcgaagatcgcgcaacacttgccgggcaggaccgacaacgagatcaagaactactggcgaacccgggtgcagaagcacgcgaagcagctcaaatgtgacgtcaacagcaagcagttcaaggacgccatgaaatacctctggatgccgaggctggtcgagaggatccaagccgcctccgcctctgtctcgaccgctactgtcgccgccgccgccatggcagccccacccacaatggccaccaccgcagcatccaacatcggcggcatggctttcccgccggccctggcgggcatgggcggcgacttcaggggcgggcgagtgaatgtggcgcccagctacagcaccccggagaactcctgcacgacggcgtcttccgactcattcggtgcgcaggtctcacccgtctcggaccttaccgaccttgaccgagtacttaccctatcc

SEQ ID NO: 329 - DNA, 1008 bp, Eucalyptus grandis
gttccaagttcactcccttcctcaagctacgattccagctctccggaaggaggaagaacgtcgcgaaattcaccggaatctctccgacccatcaacgctcgggaaggaaaggcgcgacctttgatccgccttttttttgtaccgtccgatgagtctctgggcggactacgaccacgccgccgcgaccgacctctccgccttctggccgccgccggccaccccccctccgccggcgccggcgccgccgctcagtcaggagtcgctgcagcggcggctccaggccctgatcgagggggctcgcgggagggacggggaagaaggggccggggggcccgccgcggcgtggacctacaccatcttctggcagtcctccggcgactactccggccccgtcctcgggtggggggatgggtattacaagggcgacggcagagccaggagcaggggctccgcttgctctcaggccgagcaggagcaccggaagaaggtcctccgcgagctcaattcgctgatttccggggccccgcccgccgacgacgcggtcgaggaggaagtgaccgacaccgagtggttcttcctggtctccatgacccagtcgttcgccggcggcgtcgggttgcccggtcgggcctacttcagctcgaatcccgcgtgggtcacgggggccgagaggttggggaattgcgggtgcgatagggcccggcaggcgcagatcttcgggttgcagaccatcgcgtgcgtccctgttttgaacggtgtggtcgaactgggttccaccgagccgatctaccagagctccgatctgattagcggaattagggggctgttcaatttccatgaatcggagatgggatgcggtggtagggttttgaatagcgagcatgacccggcgtcgctttggatctgcgatccgccagtcacgatggagattaacgatcgtcctatgacatttcagatagagaaccccagctcgagcagtcttaccgaaagccccagcgcgatctgcgc

SEQ ID NO: 330 - DNA, 384 bp, Eucalyptus grandis
caaaccccaccctgataagttcccagcaacatagagacactcacagaaacactcgcaaaaaacctctttgctgtcttccatggttccgccattcccgactgcagaactgcctctcaacgagaatgattcgcaagacatggtcatctaccatgtactgaacgaggccatgtcccagaacaactcctccctcccgcatccgaaccaatctgggtccccatcgagcggcggttccctcgagccgtccaggggcatcacgaagaagcactacagaggagtccggcggcgcccgtgggggaagttcgcggtgagattcgcgactcgttacgccacggggcccgagtttggctcgggacattcgagacagccgaggaggcggcgctggct

SEQ ID NO: 331 - DNA, 420 bp, Eucalyptus grandis; identical to SEQ ID NO: 318

SEQ ID NO: 332 - DNA, 1439 bp, Pinus radiata
gcaacctgaagcgttttaggcggtgaggtggaagaagggggacaagggagaacctgaagatttgtttgaattaagctgtcatcgggcagggcaagcaggtcttcatatctctgcaatatatatctatatgcggcagaccttgtttaggcaatctattgtttcgggtataagtagggaagtttccccattctgtaggattcttaaacgcatttctagggccacggaatgcgtcaaattgcacatacccacgcctcctttctcataacaggtttacgcgcgatttcttcccttctagaaggcctcttcctcctttactaaatcgggtgttgtttcatcagttttctccacaaaatccctgaagttctcttaattttttcgagggtcggttttttatagtgttatctacggttaatatcagcgaagggcctttagatccgaaggtataatggggcagcaatctctgatatacagttttgttgcgaggggcaccgtggtgcttgcggagtacacggaattcaaaggcaattttacaggtattgccgctcagtgtctgcaaaagcttcccgccagcaacaacaagttcacatacaattgcgataatcataccttcaactaccttgttgaagatggcttcgcatattgtgttgttgcagatgaatccgttggaaggcaagtaccaatggcatttctggagcgtgttaaggaggattttaagaggagatatggtggtggaagagctgacacagctgttgctaacagcttgaacagagattttgggtcaaaattgaaagagcacatgcagtattgcattgaccaccctgaagagatcagcaaacttgcaaaagtcaaggcccaggtttctgaagtgaaaggtgtcatgatggacaacattgaaaaggttcttgaccgtggtgagaagattgaacttctggttgataaaacagaaaaccttcgttttcaggctcaagacttccaaaagaagggaaccgagttgcgcagaaagatgtggtttcagaacatgaaagtgaaattgattgtccttggaattgtggtggccttgattctcataattgtcctttcagtatgccatggattcaattgttcgaaaaaatgatctggaatagatagaggtccatttgaattggaacaacttttgattggctatggatggcattcttgttctcctttgtatttctctctatattatcagtttcgggtgagatagttctatgatgtttgccagagggtattttgcttggacaatcactggttgatagtacatattgactagtatgacaacgaaatgttctgaatattcagtggggcagagactctgattgcgtacagcaactttagtgtattatatcaaggtcatgcatttgttattgttcttatctttaatgaagtattgttttacatcttagaaaaaaaaaaaaaaa

SEQ ID NO: 333 - DNA, 407 bp, Pinus radiata
atttaactgggattgcaagctgcttgtgttgtttctgtgcttcaagcgaagggaagggaagacattcctagagaagaaaaaaatcaatatcaatggggagggggaagattgaaataaaaatgattgaaaatacagcaaacaggcaagtcacattctctaagagaaaaggaggacttcttaagaaagctcacgagctctccgttttatgcaatgcagaaattgctctcatcgttttttccaacactggcaaactccatgattggtcaagctccagcatgaaaaaagttatggagaagtaccagaaatcggatcaaggactaggacttatggactaccaacaacaacagctgttgtgtgaaatgaaacgaatcaccaaagaaaatgaaagccttcgagctcgtttaagg

SEQ ID NO: 334 - DNA, 307 bp, Pinus radiata
gtaccgtctccactggtgcctacccgagaaaattacttcgtgagatattgtaaacaacattcagatggaatatgggcggtggtggacgtctctcttgacacgttgcgtgggaacccgcaaccccatcccaactgccctccttcgactttaagatgccgaagacgaccgtccggttgccttatccaggagatgcccaatggctattccaaggttacgtgggttgaacatgttgaagtggacgagagggctgtgcaccgtatttatgataagttggtaagcaccgtttcgcgccgaacgccataccgct

SEQ ID NO: 335 - DNA, 530 bp, Pinus radiata
ctttccaatattgagcccaagcaaatcaaagtttggtttcagaatcgaaggtgccgagagaagcagaggaaggaagcctcgaggcttcagactgttaacaggaagctgacggcaatgaacaagttgctcatggaggagaacgatcgccttcagaagcaagtttcacagttggtgtatgagaatggttacatgagacagcagctacagaatgcatctgtggccgccacagacacaagctgtgagtctgtggtgactagtggtcagcaccaacataatccaacacctcagcatcccccaagagatgctagccccgctggactcctgtctatagcagaggagaccttgacagagttcctttcaaaggctaaaggagctgctgtcgattgggtccagatgcctgggatgaagcctggtccggattcgattggtattgtagctatttcaaatacttgtaatggagtagctgcacgtgcttgcggtcttgtaggattagatcctacaaaggttgcagagatccttaaagatcgccc

SEQ ID NO: 336 - DNA, 402 bp, Pinus radiata
cattcttccagagggaccacctgagagccgatcagtaattgacaatcgacaggtcgaaggatcgatcctgaccattgcatttcagatacttgttaacgatctcccatcggcaaagctgacgctggagtctgttgagactgtcaacaatctcatttcatgcactgcacagagaatcaaagctgctctacataaagtcgaggatgtttgatgttcagagatcggtcgcaagctaacttaaatatgtcttcaattatttttttttaccaaaacaataaatattatttatgagtgttgaacaacaccattctcgagttttgggattgtatattatcagtttgaaagtgtgagtgcaatttgataaccgactatagggatggaaggaaaactgcatcgaaatccaca

SEQ ID NO: 337 - DNA, 356 bp, Pinus radiata
attttttctgtagatggtgtgaggacgtgctgaatagttcctaaatcgtttcttccgcgtttggtcatcgaacgagttcctataactcgccaagaccaggttcttcacggactactaattttgggcttctacacatctttcccggaagtagatggggcgggcactaggaagaacagaaataaagaggatagaaaatgaagtgagcaggaatgtgagttttagaaagagacgacgtggattgctgaagaaggctgcggagttgtcaatactttgcgatgcaacagtgggcgttgttgttttctctccggccgggaaactttctgaatatgccagcacttcggagtcaaatggatacg

SEQ ID NO: 338 - DNA, 380 bp, Pinus radiata
attcgaaaccctaccaatcggcactcatccttctacaaacgcaagggcggtttgcttaaaaaagcatttgaacttgctgttctctgtgatgctgaagttgctctgataatcttctctgaaaccggcaggatttacgagtttgcaagccacgatgatgtgaccacagtattggcaaaataccgaatacaaacgaaaactgccggaaacgcaatgccttcatcgcttcaaaaaacagagtttgatcaattacaagtcaggatgttgcaggagaagatagacaatttggagaaaacgaaaaagcatatggtcggtgagaatttggagtcactgacgtggaaggaattgcaacaagtcgaaaagaaattaagcaaggctacaaa

SEQ ID NO: 339 - DNA, 299 bp, Pinus radiata
cctacttggaaaggcaaatccttgtaactgttccatcctgcacgaattggaggttttggaggtggccaggtcatcctcccattagcccatactgtggaacatgaagagtttttggaggttatcaagttggagaatcatggcctgacacaggaagaagctttgctatcgagggatatgtttctgttgcagctttgtagtgggctcgatgaaaatgcagttggggcctgtgctgaacttgtctttgctccaattgatgcatccttagctgacagttctcctttgctcccttctggtttcag

SEQ ID NO: 340 - DNA, 584 bp, Pinus radiata
tcgcagcgtaaagcgttcatgggtgccgggcgggtaactcttgaaaaatattagattcgactccctgaccctgggaggaggaagaagaagaagaacagcaggaggaagcgaaaatttcttaatagtaaccagagaatagcagcgggtgaagaagcagagggatcttgcaatggggcggggtcgggttcagctgaggcgaatagaaaacaaaataaatcgacaagtcacgttttcgaagcgccggaacggactgctgaagaaggcgtacgagctatcagtgctgtgcgatgccgaagtggcgctaataattttctctaccagaggaaagctttacgagtttgccagttccagcatgaacaagacgttggaaagatacgaaaaatgttcatatgcaatgcaagataccacaggcgtttcggaccgggaagcacagaattggcaccaagaagttacaaagttgaagggtaaggttgagctcctgcagcgatcacaaaggcatttgttgggggaagatctgggtccgttaaatgttaaggagctacagcagcttgaacgtcagctggaggttgctctgacacatctta

SEQ ID NO: 341 - DNA, 592 bp, Pinus radiata
ttgggttcggggtcctgtcctgactggaatttttgtttcactcgttctgccccgtctggattgggctgcactgaaatacattgaacattggagttgtcgagcgcgagatatgggtcagcagtccctcatttacagctttgttgcaaggggcacggtggtcttggccgagtacacccaattcacgggcaatttcacaacaattgccaatcaatgccttcagaagattcctgccagcaataataagttcacctacaattgcgatcgtcacacattcaattatctcgtcgaagatggttacacatactgtgttgttgcagatgaatcagttggaagacaactaccaattgcctttctggagcgcattaaggatgacttcaagaaacgatatggtggtggaaaagctgacacagctgttgctcacagcctcaacaaagactttggaccaaaattgaaagatcatatgcagtattgtgttgatcacccagaagagattaacaaacttgcaaaagtgaaggctcaggtttctgaagttaaaggcgtaatgatggagaatattgagaaggtccttgatcggggtgaaaagatagaactt

SEQ ID NO: 342 - DNA, 163 bp, Pinus radiata
gtttcctactggaaatggtggaacaatcgagcttttatacatgcatacatatgcggccactactttagcttctgctagagacttctggactctgagatacacaacagtgttggaatatggtagtcttgtggtttgtgaaaggtccttgagtgggactcagggt

SEQ ID NO: 343 - DNA, 372 bp, Pinus radiata
gaggagggaggcctgctgccctcagccgtccttaatggcgagagctcctcaccaccaccagcaacagcaacaccaccagcaccaccaacaagaagccagcaggatggtgacttccttggaggtcgatatcgatactgcttgttccagtaaacctaacgattccattgatgcgctgaaatcaaaaattgcttgccatcctcactatcctcagctgttggcagcttacatggattgccagaaggttggggctcctccagaagttgtcacagtactggatgagattattcaagagaatcagcttggacgccattcgggaactatggatataggagtggatccggagcttgatcaattcatggaggcctactgcca

SEQ ID NO: 344 - DNA, 418 bp, Pinus radiata
gtagattccttgtctatcaagagggtgcacaaggtttgtttttaagaacacagacaggcagacagacagagacgtgatcatggggcgagggaagattgaaataaagaaaatagatgatgtaacgagcagacaggtaactttctcaaagcgcaagatggggatattcaagaaagcccacgagctgtctgttttatgcgatgcagaggtggctgttctcatcttttcaaacaccggaaggctctacgactatgctagttcaaggtgtatggaacgaactattgagagatatgaaaaatgtaccaaagcaattaattgcccaacatcagatcccattgtcgagaataagagcccaattcaggaaggcattgaaatattgaggcagaaacttcgtgcattacaaagattgcaaagaaatctg

SEQ ID NO: 345 - DNA, 657 bp, Pinus radiata
ggtacaagaagtggctcatattgcaaatgggtcgcacccgggaaattgtatttctcttcttcgcgtaaatgcatgtagtacaagccaaaacgtagagctaatactgcaggagagttgcacagatgcatctgggtctgttatagtgtacgcccccgtggacgtcccagcaatcaatattgctatgagcggggaggatccttcatacatagcccttctcccctctggatttgccattcttccagacggtcaaaatagatcttctactagttcactcctcgaaggggcgaacagcagcagcaacagtagcaacagcagtggattggatagcccgctcacaagaggaggttcattactcactgtggcctttcaggtgcttgtcagccatttaccaacagccaagctgggtttagattctgttacaaccatcaataatctcatatgcaatacagtgcagcagataaaatctgcattgcactgtgcagatgtctgaatcgcagtgtaattatcggagtacgggtggagggggcggcatgcagagaaacaacataaaaaacgttctatccggtacttgcacccccaagggtagtagaataaaaaatgatatgcatatatatgtttggtggttgctttctgtagttttatctgctgcagttaagt

SEQ ID NO: 346 - DNA, 377 bp, Pinus radiata
aaccggagagcaagaacaaagtggaaacgcaacgaagtggagtgcgataatctgaaacggtgttgcgagagtctgagggaggagaacagaagattggagaaagaagtgcagtcgctgagagccatgaaagtcccgcagtcacccaattcgatgcctctggcagccgccaccctcgcaatgtgtccggcctgcgagggccttgcaatcaagaaccgcggcgccgccacttcctccaccgcgaagtcacaacaatccctccttacaattatggggattggggatgtaaatatgatatccaaaaataaccaaaccccttcaatgggaatgggagatgaaatgaattgaagaaagtgaacttaaaaaaaaaaaaaaaaaaa

SEQ ID NO: 347 - DNA, 558 bp, Pinus radiata
gaaagaaggaaagaatggggcgagggcgcgtcgagctgaagcggatcgagaataagattaaccgtcaggtcacgttttcgaaacgccggaatggtctgctgaaaaaggcgtatgaactttcagtgttatgtgatgcagaggtagcacttgataatattctcaagcagaggaaaactctatgagttcggaagcgccgggatgctcaagactctggagcgatatcaaaaatgttcatacgtattgcaagacgcgactgtatcggaccgggaggcgcagaattggcatcaagaggttggcaaattaaaagccaaagttgaacttttacaacgatcacaaaggcacttattaggtgaagacctgggccccttgagtattaaggagctgcaacaactggaacgtcaacttgaggttgcactgacacatgttaggtcaagaaagactcaagtcatgttggaaatgatggatgaactacgcagaaaggagcgaattttacaagaagtaaacaaatctctgcgcaagaagttgcaggaggccgagggacaggcattcaatgccatg

SEQ ID NO: 348 - DNA, 331 bp, Pinus radiata
ctcagatacagctaatagcagtgagcttctgggcagcagcagatcagatggagatcacccacatcatggccaccatgatcagcagcagcagcagcaggagaatcatatggtgtggcagaattcaaggctcaaggcagatgttctccaacatccactgtatgaccagttgttggctgctcatgttgcctgcttgaggattgcaactcctgtggatcagcttccaaaaatagatgctcagttggctcagcagcaccatgttgtggccaagtactcagtcctaggaaggaaccagctcttgactggagaggagaaggaggagcttgacaggttc

SEQ ID NO: 349 - DNA, 260 bp, Pinus radiata
acgaaattaccttggggagtatactggagagttgatttcacatcgggaagctgataagcgaggaaagatttatgatcgagaagactcctccttccttttcaacttgaacgatcagtatgttcttgatgcataccggaagggggataagttgaaatttgcaaatcattcaccaactccaaattgctatgcaaaggtgattatggttgctggtgatcatagagtgggtatttttgcaaaggaacgcattgcagccggtgagg

SEQ ID NO: 350 - DNA, 479 bp, Pinus radiata
aaaatttaacagaaacattgcaagctgcttgtttaatttctgtgcttcaagggaaaggagaggaagagattcccagaggagaagatcaagataaatggggagggggaagattgaaataaaaatgattgagaacgcaacaaacaggcaagtcaccttctctaagagaagagggggacttaaaaagaaagctcaggagctctccgtcttatgcaatgcagaagttgctctcatcattttttccagcaccggcaaactccatgagtggtcaagctcgagctcattctttatgttacaaaaaagcatgaagaaaattctcgagagataccagaaatcagagcagggactaggactcatggattatcaacatcaacagctgttgtgtgaaatgagacgaatcaccaaagaaaatgaaagccttcaagagcgtttaaggcatatgaatggcgaggaagtcaattcattgaagctcccagagcttt

SEQ ID NO: 351 - DNA, 260 bp, Pinus radiata
gctatttgcagcatttccttccatccgtacccaaaagatgctgacaaacatttactagcaagacagactggactgaccagaagccaggtttcaaattggtttataaatgcacgtgtccgcctttggaaacccatggtggaagaaatgtatatggaggaacttagagaggccgaaacacagaatcatgcagcagattcgaaggtaacaacagaaagtggtcaaaacaatgaagaaacggtgtcaaaggaaggagctgggaa

SEQ ID NO: 352 - DNA, 176 bp, Pinus radiata
agggggctggttacagctctgtgagcggaatagatgaacatgcagctggattctgttctcaacttgtgtttgcaccaattgatgcatcttttgctgatgatgctcctctggctgccctctggtttccgagtaattcctctagaatctggatcagaatgtttctcctccaaaacgga

SEQ ID NO: 353 - DNA, 338 bp, Pinus radiata
ggacggaggaggacgaggagctggtcatttcgtcatggaacagtttatacctgagcaggccgtcatctctgattcgtccatatcttcggtgaaaacagaagtttgcagcggtagtggaggccaatttgagctgatccgcaggaaagaagaggggagatgcggccgtgcctatgctgagccttcatttgttgtcactcctctagttacttcattacctccacagcagcaggaaggccggatggtaacatccctggcagtggatatggacagctcatgttcttgtaaaccaaatgaagctgatgccatgagagcaaaattatttgcgcatgtacactatc

SEQ ID NO: 354 - DNA, 405 bp, Pinus radiata
gggcaaggggaaagacacagatgagaaagatcgagagcgcgaccagcaggcaggttacgttttctaagcgcagaaatggattgatgaagaaagcttacgagctgtcggtgctctgcgatgcccaactgggactgattgttttctcccccagagggaaggtctatgaattctccagtacctgcatgcagaaaatgttggcacgatacgaaaaatgttcagaaggaagtgacacgagtacatcaaaagagcaagatgtccagtgtttaaaacgagaaagtgcgaatatggaagaaaggattgaaattcttgaatccatgcaaagaaagatgttgggcgaggagctggcatcatgtgcattgaaggatttgaatcagttggagagccaggttgaacgaggtttgagaa

SEQ ID NO: 355 - DNA, 332 bp, Pinus radiata
tctctctggtgtggggagcactcaaaatggggaagacgaagatggagattaaacgcattcaaaaccctagccgccgccaggttactttctcgaaacgcaagaacggattgctaaaaaaggcattcgagctttctgttctctgcgatgctgaagtcgccctgatcattttctcggaaactggcaagatctgcgagtttgcaagccacgacgacatggcaacaatactggaaaaatatcgaatatacacggaaacacatggaaacatggagtcctcgtcggtccaaagcgtgaagattggtgaatcacaactcaaagcgttgcgtgagaagatg

SEQ ID NO: 356 - DNA, 405 bp, Pinus radiata
aaactccccaaggaagcaaggcaaaagttgttggattggtggaccagaaactataagtggccatatccttcggaaagtcaaaagatagcattggcagaatctaccgggctggatcagaagcaaataaataactggtttataaatcagcgcaagcgacattggaaaccatctgaagagatgcagttcgtggttatggatagtcctaatcctcacaacgctgcttttttcctggagggacatctcaggacagatggaactgccttttcaatggattgttgaagttaaacccatttttgaggcaaacaccagttttagtgcaatgctgtagatttgtctgactcatcttttatatgtatagctggatctctaaaatgggccatgtttcataacgtgctagatatgagt

SEQ ID NO: 357 - DNA, 468 bp, Pinus radiata
acttttcatgcgtttcgaaggccgccatgattctggcagagcacagcgaaggcgatgcagagctggaggaagtagcaggggaatgtttagagagggttccgcctttacacagccgattcacgcataccacaaaaagaaaaatgtacagttttctaatggacggcccatttgtttactgtgccatagtggatgaagcgctcgggaaaccgcaggtctttgtatttctcgagcatgtcagagatgagttcaagaaattgttgaagaacagaggttgtgaagggctcagttcgtgctgttttgataaagaattcggtcctgtttacaagcgccttgtggctcctcttgtgggtgttcctcaaatagaaaaggatcgcttgatggaggaagaatcgaaatcccaacctgctaaaacacatccagtccaggtaaataattctcccaaagattctctacctgtgtatgataata

SEQ ID NO: 358 - DNA, 499 bp, Pinus radiata
aagatgggagcttggtgatctgtgaaagatctctctctgcggctcaaggtatgcctatggtatcacagtctcaaagctttgtgcatggtgaactcttatctagtgggtatttgatccgaccctgtgaaggcagaggagcattagtcatcatggttgatcacaggaacttagaggcttcaagtgtccctgaagcacttcgtcccttatatgagtcatctacattctttgcacagaagatgacagttgaggcttcttatcatcttcaaggtaaagttcaaccggaaatgatttccttatcaaaaaaactccaacagccatgtaatgtacggtcatacagtcaacggctttgcagaggctttaatgaggcagtcaacacattacctgatgatggctggatgtcattgtccaaagatgggctgggggatgtcactatttgtgaaagctttgtcaaattgccggaaccaaatgcatcgcaaatagcctatgtcaacagcatggg

SEQ ID NO: 359 - DNA, 462 bp, Pinus radiata
acgggctctccaacaattaggcatgattcagcagcatgcttggaggccacagagaggacttcccgagcgatctgtttctgtcttacgggcttggctatttgaacattttcttcatccgtatccaaaagatgcagacaaacatatgctcgcgagacagactgggcttaccagaaatcaggtctcaaattggtttataaatgcacgtgtacgcctctggaagcctatggtggaagagatgtatgtggaggaaacaaaggaggcagaagtagaccatggatcaaatgataaaacaggtaaggagagtggcgagaaaaaagaagatgcattgtcaaaggaaggagctgcaggcaataatgggaatatacatgagcagcaaagtgggaaaatctcaaaactcgacaatattgcacaggatggaggtgctgatgaaaaacctgctggtgtgcccaaatctgaaaatgc

SEQ ID NO: 360 - DNA, 357 bp, Pinus radiata
ggagtgttgaaattcccctgttttgatctgataactatgaatctgatggagtcttttgaggcaaagggaaagggagagaagaggagaacggtgagggggaaaacccagttgaagagaattgagaacgggaccagcaggcaggttactttttgtaagcgcaggaatggtctgctgaagaaagcgtacgagctgtcagtgctttgtgatgccgaagtggcacttattgttttctccccaagagggaagctgtatgagttcgctaatcccagcatgcagaaaatgttggaacgatacgaaaaatgttcagaaggaagtaacccgacgagtacagcaaaagagcaagacgtccagtgttta

SEQ ID NO: 361 - DNA, 749 bp, Pinus radiata
gagcttcatccgccattattgggtttcaattcgatcttgatttgccagagacgatgtgaattaccattctgtgggcaaaagcgagagaggaggagaatggtgaggggaaagacccagatgaaaaggatcgagaacgacacgagcaggcaggttacgttttctaagcgcaggaatgggttactgaagaaagcttatgagctctctgtgctctgcgatgccgaagtgggacttataattttctcaccaagagggaaactatatgaattcgccagtcccagcatggaggagattttggaaaagtataaaaaacgttcgaaggaaaatggcatggctcagacaacgaaagagcaagatactcagtattccaaacattccaaacaaaagctcgcaaatatggaagaacagattaggattcttgaatcaacccaaagaaagatgttgggggaagggttggaatcgtgttcaatggcagaattaaataagttagagagccaagctgaacgaggattgagccatatacgggctcgaaagacggaaatattggttgaccaaatagaatgtcttaaaaggaaggaacgtctcttaagcgaggagaacgccttactcagtagaaagtgggttgatcgtcaatccgtggacggttccggttcaacatcatcttcaattggattgggaagcatcgagcagatcgaagttgagacacaactggttataagaccgccaaatgcacaggatcactgttctgtaaa

SEQ ID NO: 362 - DNA, 670 bp, Pinus radiata
gtttgcttgccgtgaaagaaatcgaacttccggcgcttgggtgcgagaaatatttgcaaatcgaacttccggcttgggtgcaagaagcttttgcgttttcggtttcagattaaagcaatatggagtcagaggaagacaaaatatctccagagaacaagaaaaggagattaaaaaccccacagcaggtcgaaggtctagagagcttttatgctgaacataagtatccttcggaagctatgaaatcacagttatcagaagaactgggattaacagagaagcaggtacaaggatggttctgtcacaggaggcttaaggataaaaggctcatgaaggaagaagcttccaacaatggaaaacaagatccacacaatggcataatgcaagattctgttaatggagtcaaacaagattctagcggcagtggaaaaaaatctgatcaccaacgccattcgaggtgcaaagaggttgaaagtcaacgatttgcgaatgccatggattatcctgcagctgtccttgcgtcagagcttagggatcatgatttgttcaaagtaaaccatgataacgaagacacctttgcaggaagtagttcagcttcacaagacagatcgtcattacaaagtgggaatccttatgaagctgaggcaagaagacgcccatttcagaatggtaa

SEQ ID NO: 363 - DNA, 651 bp, Pinus radiata
tagacctaattctgaggtcaatgaatctctgctgaaaacactttggcaccactctgatgccatcatgtgttgctccttgaaggtaaacatgtacaatatcatagactttcttctggagattaatttcaagtttgcacaattcttacgttaggctttgtttggtgctgtgcagtcattgcctgttttcacctttgcgaatcaggcaggccttgatatgttagaaacaaccctggttgccttgcaagatatatcattagaaaagatacttgacgacaatggccgcaaaagcttttgctcagatattgctcaaattatgcaacagggatacgcctatctacctgctggagtgtgtgtttccagcatgggcaggcctgcttcctatgacagggctattgcttggaaggtcctcaatgatgaggaaaatccccattgcatagcattcatgtttatgaattggtcctttgtttgaccattatttttcattgtacaaattataccgagtccttgaagttaacttattgaacaaaatctctttctggtcaagccttgtgtgactggccaaagaaaaaatacagagggagagcatgtaagcagcatatttggttgctacatttttgcttttaatttgaaaaatgaattctgttggacaag

SEQ ID NO: 364 - DNA, 257 bp, Pinus radiata
ccaaagaatttggcacgagcccgccagcaacaacaagttcacatacaattgcgataatcataccttcaactaccttgttgaagatggcttcgcatattgtgttgttgcagatgaatccgttggaaggcaagtaccaatggcatttctggagcgtgttaaggaggattttaagaggagatatggtggtggaagagctgacacagctgttgctaacagcttgaacagagattttgggtcaaaattgaaagagcacatgc

SEQ ID NO: 365 - DNA, 357 bp, Pinus radiata
gtgaattccaaccaaagtaatatgcttatacttcaggagagctgcacagatgcatctgggtcgttcgtaatttatgctccagtggatatagttgccatgaatgttgtgctcagtggaggtgatccagattatgtggctcttctgccatctgggtttgcaattttaccagatgggccaaagtgcatggcagtcaccaattcaggcattaacgacctaggcagtggaggatctttactcactgtggcttttcaaattttggttgactctgtgccaacggctaaattatccctggggtctgttgcaacagtgaatagtctcatttcatgcactgtggacaggattaaagctgctgttact

SEQ ID NO: 366 - DNA, 309 bp, Pinus radiata
attcactggtattttagcagcttttgtttcatctaaggtcacagagcatcagccccctggtcacatgccttcggtcacacagggctccgccatggccaaccccaatttcgtggctttgcataataatcagggtcatgacggaggagcaaatggagaccctgcgcaggcaaatttgcgtttattcaacaattggcagtcagttggtagaaatgcacagagccatgtcacagcagcaggccttcttcagtggccgactctgcttatgggacaacacatgctttatgatctagctcaaggaaatccagggtt

SEQ ID NO: 367 - DNA, 575 bp, Pinus radiata
ggaaggaaagaatggggcgagggcgcgtcgagctgaagcggatcgagaataagattaaccgtcaggtcacgttttcgaaacgccggaatggtctgctgaaaaaggcgtatgaactttcagtgttatgtgatgcagaggtagcactgataatattctcaagcagaggaaaactctatgagttcggaagcgccgggtatggtattgaaatctctggacttttttctgggattttgtattataatattagagttggagaaggctgtgagggagagaagagaggttgtaaagtttattccgtgatttgttttaaaggaaaatcttaaattagctaaaacttttgtgcacgttcaaaaggcctttaaattttctctccagttgagagtattttgagaaaataagccgaatgcgcccgggagccacacaattgtagcaagcttcagtttattttcaaagcatttctccgaataagctagaaatgctaagaattttgtgaatcgctaaagcatttgtaacatatagcgcagatatcaaaaaaataaagaatttatcggtaaaaaaaaaaaaaaaaaaaaaaa

SEQ ID NO: 368 - DNA, 243 bp, Pinus radiata
ctgagagttaagtgattgttgggagggaaaagagaaaaaagaggagatcaagaatggtgaggggaaaaatccagatgaagaggattgagaatacggccagcaggcaggttacattttccaagcgtagaaatggattgctgaagaaagcttacgagctctcggttctctgcgatgcagaagttggacttatgattttctcgccaggaggaaagctctatgaattcgccaataccagcatggaga

SEQ ID NO: 369 - DNA, 184 bp, Pinus radiata
ctatgctattacagaatgtgcctccagcactacttgtccgcttcttgcgggaacatcgctcagagtgggctgattgtaacattgatgcttattcttcagctaccatgaaagcaaatgcttacaatgttccaggttcactgggaggcattacagggagtcaagttatccttccactggcacatac

SEQ ID NO: 370 - DNA, 158 bp, Pinus radiata
acatcccgtcttcactttgttgatcaacaattacgacaacagcgagctcttcagcagctaggaatgatacagcagcatgcctggagaccacaaagagggcttccagagagggccgtttctattctccgggcttggctatttgagcatttccttcatcc

SEQ ID NO: 371 - DNA, 462 bp, Pinus radiata
gcagtggtcatatggatgggggatccggagaggaccaagatgccgccgatcaagatcacgatcacgatcacgatcatgatcacgagcagcagcagacgcggaggaaacgttaccacagacacactgctcgtcaaattcaggagatggaagcgttgtttaaggagtgtccacatcctgatgacaaacaaaggcagcggctcagcattgaattgggcccttaagccgcggcaggtgaaattctggtttcaaaatcggcgtactcagatgaaggctcaacaggatcgctcagacaacgccattctccgtgcagagaatgaaaatctgcggaacgagaacgtagcactccgagaagcaattaaaaatggtgcttgtccaaactgcggagggtctacatcgctgggagagatgcctggattcgacgaacaccatttccgtatagagaatacgcgcttaaaggaggag

SEQ ID NO: 372 - DNA, 510 bp, Pinus radiata
gcaaccggagctttaagactagaatatatatgtagccctcgggctctgacgaatactgaaactagagatacccacctcttatctggtgtgtaaggcacgcaaaatgggaaagaagaaggtggaggtgaaactcattcaaaaccctaccagtcgccaaggatgtttctacaaccgcaagtgcggtttgcttaaaaaagcgtttgagctttctgttctctgtgatgctgaagttgcccttataatcttctcccaaaccggcaagatttacgagtttgcaagccatgacgacgtcaacgcaattctcgcaaaataccggatacaaacgggaacaacaacaaacgcgatgccttcctcgcttcaaaacaccgagccggagacgttgcatgaggagacaaatatgttgggaaaaaggaaaaaagtggagaagttgcatgagaagatcaatatgttggaaaaaagaggaaaaaacatggtttggtgaaaatttggagtcattaacggtcaatgaat

SEQ ID NO: 373 - DNA, 466 bp, Pinus radiata
tggatcaccatgcagtagaggatagggagttaaaaaatcatctccttcgcaaatacagtggatatttgagtagtctaaaacaggaattcatgaagaagaaaaagaaaggaaagctccctaaagatgcacggcaaaagttacttgattggtggagtctgcacgacaagtggccttatccttcggaaacggagaaaatagctttggctgaatgcacggggttggatcaaaaacaaataaataattggtttataaaccaaagaaaacgccactggaagccttctgaagatatgcacttcatggtaatgaacagtcacagtcctcacagtgctgccttgtatgttgagagacatatgatgactgaagggtatctttagattgctagaaagaaccttcggctgaaaacagcacacaatgctattgcttttgttgtatttaattggcatggctttcaattttaaaaaaaaaa

SEQ ID NO: 374 - DNA, 573 bp, Pinus radiata
atctctgttgggatctagaattgagaaagggacgcttgtgggctggtgggtttccacaatgagaggctcctcccgtgcatatgatgcattttattctatttgttgatcctgtcaatggaaaaaaagagagcagtcgaatttggcattgaaatacatgatcagcaagagattgaaacgtagcttatggacccccgaaggaatggtgggggggaatacgaggtaggaggtagccagccgaaagagctgatctcagagaactattatacaaacacagtctgcaaaagaagaaatactgtgatgcatttttggatgatgcagtaaaggcagacacctatgaaaaaattgtttcattctgagatatggaacacctgaatgcagctgctgcccaggcctcctcttcgctttatggagttagcatggccgagtacggagacgtcggcgtcagctcaatgatggcgctgatgacccaacacgagcctcatgaaagcgagagcacaatgacgacgagtatgcctagttcattttcatcgttccatggccatgctgaatgccttctctcagcagcaatgttcc

SEQ ID NO: 375 - DNA, 526 bp, Pinus radiata
ggattcttgtatttttgtgtgttgctgctgcaacagttcttaaataccaagacattgatgagagcttgagtaatatttctgcaaaaacccaagtaaaccctgaagctagtccaaactagtggaaggaacctcggctattctgtaagttcactcagattttgagaaactcttgggattttgctcaaaatggggcgtggtaaaatagagatcaagaagatcgagaacagcgtgcacaggcaggtgaccttctgcaagcgccgaggcggtctgatgaagaaagcctacgagctttcagtgctgtgcgatgcagatgtagcgctcattgttttctcgagccgaggaaagttgtacgagctgggcaccagcaacaacaacaacaacagtatgaggtcaatattggaaagatatcaaaagtgttcacagacggcaaaacatatgaacttttcgaataatacttcagacgagaaaatgaagcaagaaataaatttacttaaacacaaattgatcagctaaacttactaacaga

SEQ ID NO: 376 - DNA, 335 bp, Pinus radiata
aaaatggcggcttagatgaattacgagcagagactcatcgcagcggcacggctagctgacaacctgaactccacgactgcaaaagaatttgatattcccagcgctgaagaagttgccgagaaatgttcagaatggggagtcaccgcacagctgaaggcacaccaggcccaaggactgtcatggctgatacgccgatatgccattggcgtcaatgttatacttggggacgagatgggacttgggaaaacattgcaggctataagtttgttggcttacttgaaagatcgacggaaatgcccagggccatttttggtattgtgtccattaagcgtaat

SEQ ID NO: 377 - DNA, 773 bp, Pinus radiata
gaagtgtggatgttcttactgctttctcaactggaaatggaggaacaattgagcttttatacatgcagatgtatgcgccaactactttagcttctgcccgagatttctggactcttagatacacttctgtattggaagatggtagtcttgtggtttgcgagagatccttgagtggaactcagggaggtcccagcatgcccgcggtgcagcagtttgttagagcagaaatgcaacccagtggatatttgattcggccatgcgaaggtggaggttctctaattcatattgttgaccatatggatttggagccatggagtgttcctgaagtgctacgtccactgtatgaatcatccactgtacttgcccaaaaggttacaatgtcggccttacgccatttgcgtcaaatagcacaagaggcatcttctgatgtggtccttggctggggaagacaacccgctgcattacggacatttagccagagattgtgcaagggtttcaatgaggcagttaatggcttcacagatgatggatggtctttgatgggtaacgacggaatggaggatgtaactattctcgtcaattcatctccaagcaaactgttcggtcaacagtttgcttcttccgatgggcttcctgctcttggtgggggcatcctatgtgccaaggcttctatgctattacagaatgttcctccagcattgcttgttcgtttcttgcgagaacatcgatcagaatgggcagatagtaatattgatgcctattcagcagcctct

SEQ ID NO: 378 - DNA, 407 bp, Pinus radiata
atggcaatggaagagaggagtggtgatcttttgaaaggctgtggtctttctgagaatgcattggatgctatctctgagggttctatacagaatcattggtcatggtcagaagtcaagcaattgtctgtaactcttcttcgtgctctagatgcgggaattgaacactctctccttggttctatgatgtcaatagacagatatgcagcagcagagagctttcatagacttgcttgggcttatgcacacgtgccagatctgcatatcatgtggcttcttcatttatgtgatgctcatcaagagatgcagtcttgggcagaagctgcgcaatgcgcagtggctgttgctggggtcataatgcaggcattggtaggaagaaatgatgctgtctggggaaaggagcatgtaac

SEQ ID NO: 379 - DNA, 385 bp, Pinus radiata
cgaggtcgagtccagctgaggaggatcgaaaacaaaatcagtcgtcaagtaactttttctaagagacggaacggactgatgaaaaaggcggcggagctgtcaatactgtgcgacgctgaagtggccttaatcgtcttctccaacaaagacaaactgtacgagttcgccagttccagtatgaccaagattttggaaagatatcggaagcgttcaaatttaatacaagatatcggtaaagatccacagaattcagacattgagttgacgcgtctaaaagaagaggttgaccgcttacaaagatccagaaggcatcttttgggtgaagaccttcatcaactaggtgctacggatctgcaacacttagaacaacagcttgaagaagcgt

SEQ ID NO: 380 - DNA, 513 bp, Pinus radiata
tttcaatgcccctctttttccagtggacgagtgttcaattttccctgtgttgatctgatacctataaatctgatggattcttttgaggcaaagggaaagggagagaagaggagaacggtgaggggaaaaacccagatgaagaggattgagaacgcgaccagcaggcaggttactttttctaaacgtaggaacggtctcctgaagaaagcttacgagctctcggtgctttgtgatgccgaagtggcacttatggttttctccccaagagggaagctctatgagttcgccaatcccagcatgcagaaaatgttggaacgatacgagaagtgttcggaaggaagtaaaacaacaagtatagcaaaagaggaagatcccaaggctttaaaacgagaaattgcgaatatggaagaaaggattgagattcttgaacgcacgcaaagaaagatgttgggcgaggaactggcatcatgtgcattgaaggatttaaatcagttggagagccaggttgaacga

SEQ ID NO: 381 - DNA, 210 bp, Pinus radiata
cacagttctggaacctgttaaagagaaatcagtcgaggtcaaactccttctgtttgcacgaggatgcccagcattatggagaagcaaaatagtggtgaagatagtgatagcaagggtcagcttgataatggcaagtatgtccgttacaccaatgagcaggtggagactttagaacgtgcttataatgaatgctcaaagcccagcacaagc

SEQ ID NO: 382 - DNA, 380 bp, Pinus radiata
cttcgttctccaggatttctcgacaggttttaaacgacgctagcaaccccctgtgattttacagtctgttttgccaggccggtgaaaatgggtgcattcgcccttctatcaagctggattgatgctgccactaatcccaagtacaggaagaagcgtaaacaatttcagaccgtggagttgagagttcgaatggactgtgaaggctgtgagagaaaagtgagaaacgcactaaattcaatgaaaggagtaagttctgtagaagtggagagaaaacagtataaggcaacggtgacgggatacgtggatgccaacaaagtgctgaagagagtgaggcaaacagggaaaaaggcagaattgtggccttacaagccttaccatct

SEQ ID NO: 383 - DNA, 407 bp, Pinus radiata
ttttcaaacacttggttttcaggcaatttacttgcccctggagccaacaaacagatgcatcttgattccagttctactggagcaccagggctctcaaatgttctgataggctccaagtatcttaaagcagcacagcaattgctcgacgaagttgtcaatgtaggtaagggcatcaagcctgattcagccaaacatcagaaatcacaatcatggattggaacaacagctaataaagagaatagtggagctgaaggtggtgggaaggatggagcagctgctgcccctacatggcgttcaacttcagcccaagaaacaaatgaccgtccctctgagctgtcaccagcagaaagacaagagcttcagatgaaaaaagcaaagcttgtggccatgttggatgaggttgatca

SEQ ID NO: 384 - DNA, 441 bp, Pinus radiata
ggcaagaatagttgcctgatagcacggaatttattaagtggccttagaacgtgttcagagatcgctgaatacatgtcccacaatgtatctgcaatacagcatggagttggggatgtatcaacactccactctgatggtagcaggaagactgattgtggtgatattctgaagttcggacaagagcaagattttggcgtagaaaagggagagtgcggaggtttaagtacacatgcaagtctgctggtcatccatcaatcaggaaaagaattaaagatggaaaaggacagccatgtagacaatatacaccatgtggttgtcaactgacatgtggaaagcaatgcccttgcctccgaaatgggacttgctgtgaaaaatattgtgggtgctcaaagagttgcaagaaccgtttcagaggttgtcattgtgctaagagtcaatgcc

SEQ ID NO: 385 - DNA, 423 bp, Pinus radiata
agcagatgaaagcctttggattccgaacctggatgctggtaaagaaactcttagctatgaagaatacatgcgccaattcccttccacaattacgccaaagcctataggccttgccactgaggcgactagagaaactggcatggtgatcacaaacagcttgaatcttgttgaaacactcatggatgtggatcactggaaggaaatgttcccctgcatgatatccagggcagccacagtcgatgtaatatcgagcggaatgggcgggacaaggaacggtgcactgcaactgatgtatgcagaattgcaagtgctttcaccgttggttcctgctcgagagtacttctagagcggccgcgggcccatcgattttccacccgggtggggtaccaggtaagtgtacccaattcgccctatagtgagtcg

SEQ ID NO: 386 - DNA, 445 bp, Pinus radiata
gcaaagcgaaaatattatgtccacgaggatcccaagctcgttttcatcattccatggccatgccgattgccttctctcagcagcaatgtttcagggttctcaaggagatcataagctcaatccacagcctgggatgaaccagcagctagtctctgagcagtctatcatgtcagattcgtccatgccgtttgttaagacaaaagcttgctctggtcttcgtaatcagtttgaatttcacagggaacaacccggaaattgctacacagatcagtcctcaaatattccgctaagccccatagtcacatcgttagcctcgcaggctcgaggagaagcgcggatgataccgtccttggatgccaacagtgctcatttcaatgtggataacgaggagcatgcaataaaatcgaaaatcttagcgcacccacagtatccgagcttgttggga

SEQ ID NO: 387 - DNA, 343 bp, Pinus radiata
gaactagtcaatcagagatgccatgagaaatcccatctgcacaaactgtggaggacctgctgttcttggcgagatgtcctttgaagagcagcaacttcgcattgagaatgcccgcttaaaagaagagctggatcgattgtgtgcactagcagggaagttctttggcagacccattccttcaatgccatctgttccccttatgcctaaatcatccctagaccttggagtcggtggcatgcccacttcgttgccctcggctagtgcagacttgatgcatggacctgctggtggtcgaacaggaaacataataggtattgagaggtcgatgctggctgagcttgct

SEQ ID NO: 388 - DNA, 1193 bp, Pinus radiata
ccgttgttgttcctttctccaccctcagcgtctccttacacacacaattcaatcaatcccctcgccacgccaccgcgttcgcctgttcttcctcctctggatcaacccattcccacagtcctacttcgctcaatccgacggctaatttttgcgaaatctctgtctctttctcttattaccggtttctgattagaaactggcaaaaacagaggatttagcagtacccaactggggaacagagcgttccgaatgatgggtattgttgtttcctgctgtctggtatctcgcatgcgagctctctggagaagcagcttctttcgccataaagttcacatatctctgggcaactactggttttgctagcgattctgaggtgggcatatgctcagcttttaatgctactagaggacaccgtttgaaggagtttttctctgaggagatgatgatgtctggtgggagaatgtatggtgggccgaacgtccttgtcacggccaacgagaacatttcccgctctgcagatgcactggaagctctactttcttctcctgttttcaatggttcaagatctgtagctaatttggaggaggtgataggtaatgtgtcaaaaagatcattttacaattcctttgaccaggaagaaactggagatgaagaccttgatgattgtatccatccaccggagaagaagagaaggctgactgctgaccaagtgcagttcctggaacgaagctttgagatcgaaaacaagttggaacctgagcgcaagatacagctagccaaggagttgggcctccaacctaggcaagttgcagtctggtttcaaaaccggcgggcaaggtggaaaacaaagcagttggaaagggattatgatattctgaaatcacgctatgagaatttgagagttgattatgatagcctgctcaaagaaaaggataaattaagggctgaggttaccttcctaacagacaagctacacgacagtgaccatgaagccctcacaaaggattctgagtctgctgacaagaaagtctatccccagcctgcctcccactctgactgtgttggggagcctgaaagaagtactgctgccaaggatacaccaccaggttgtaaacacgaagatcttctgagctctggaacagatagcagtggggtcctggatgaagatagtcctcaccatgttgactgtggtc

SEQ ID NO: 389 - DNA, 385 bp, Pinus radiata
aaaattgagaatactacaagccggcaggttacattctgtaagcggaagaatgggttgctgaaaaaagcttatgagttatctctgctgtgcgatgcagaagtggctctcctcattttctccaccagtgggagactctatgaatttgcgaataagagtgttagcgcgacaacggagcggtacatgagaacctatgcagagaacatgcctcagtctcgagctctgtatccggattgtcaccattggcaagaggaagtcagaaaacttacacagcaacgtgatagtctaaccaattcgatcagacaaataatgggtgaaggccttgaatcattaagcatgaaggagctcaagcatattcaagttcaattggaaaaaagtattagttgtg

SEQ ID NO: 390 - DNA, 359 bp, Pinus radiata
gtacactgcagagcaggtggaagctctggaacgcctttacaatgactgcccaaagcccagctctctgcgtcgccagcagctcatcagagaatgcccaatcctttcacacatcgagccgaagcaaatcaaagtctggttccagaatcgaagatgtagagagaaacagcgcaaggaggcaagtcgtctccagactgtcaacagaaagctcacagccatgaataagcttcttatggaggagaacgatcgccttcagaagcaagtctcgcagttggtttacgagaatggctatttcagacagcagatacagactgtttctattaccaccacagatactagctgtgagtctgttgttactagcg

SEQ ID NO: 391 - DNA, 257 bp, Pinus radiata
caagcatgaatttgatgtgcggtatcagaagcttgaggacaaactatatattgcacagctttatttccccctgattggactgatattggatgagatgccggttttttacaacctcagcacagtggagaagcgtgaagttctaatctgtatcatgcagataatccgcaatttggatgacccatctcttattaaggcatggcaacaaagtattgctagaacaaggctctttttcaagcttctggaagaatgtcttgtcc

SEQ ID NO: 392 - DNA, 290 bp, Pinus radiata
ggcctcctcgtgactatgagactcttcgcagcgactgaaccgaaacgtgtcttcgcagtgacaaaacgtatttttcttcttggtttcgtgtctttctttctgcgtgagggcctcgtagccagcgtgtggcttcctgtttctccgcaaagattatttgatttcttgagggatgagagactcagaagcaagtgggatatactatcaaatggaggtccaatgcaagaaatggctcacattccgaaaggacaagatcctcgcaactgtgtttctcttctaagagcaagcatatg

SEQ ID NO: 393 - DNA, 465 bp, Pinus radiata
gctggtatcattatacaacaatcatttgaatggaatattggcagatgaaatgggtcttggcaaaacagtgcaggtaatttcattaatatgttacttgatggaacaaaagaatgacagaggacctttcttggtagtagtgccttcctctgtattgtctggttggctgagtgaaattagcttttgggcccctagcatcagtaaaattgcatatacaggttctcctgatgatcgccgtcgattattcagggagaacatttctcagcaaaaatttaacgtgctcttaactacatatgaatacttgatgaacaaacgatcgaccaagactgagtaaaatttcatggcattatatcataattgatgagggacatcgcataaaaaatgcatcttgcaaactgaatgctgagctgaagcactatcatagtagtcatcgattattgctcacgggaacaccactccagaataatc

SEQ ID NO: 394 - DNA, 157 bp, Pinus radiata
tcccaaagatgctgacaaacatatgctagcaaggcaggcaggtttgacaagaagccaggtctcaaattggttcataaatgcacgtgtccgtctctggaagcccatggtagaagaaatatatatggaagaaatcaaggaagctgagttaggacattca

SEQ ID NO: 395 - DNA, 384 bp, Pinus radiata
accaatttaacggcgaagcaaccgacccccctgaaatccccttaacacgaatttctgagctggggccggtattgtgtagcagcaggatgatgacgccaaggtttatgaatccccccttcgacggaagaacgcagaggcaccgcggacccgatggagatttctacccctggaatcggcccttgaaaatccttaccagggtctcatgaagcactgcacatccctgctaaaaacgctaatgaatcacaaatttggttatgtttttaacgagcccgtcgatcctgtggccctgggggttcccgactatttcactgttattacctcgcccatggatttgggcaccatcaaggcaaaattgcaggacagcgtttattcaagccctctcga

SEQ ID NO: 396 - DNA, 694 bp, Pinus radiata
gttgcactggagttgctgcacgagcttgtggctttgcaggtctcgaaccttcaaaggtcgcagatattcttaaagatcgtcccgcttggcttcatgattgtcggcgcctggatgttttgactgcatttcctacgggaaaaggaggggcagtcgagcttctatacacgcaaatgtacgctccaactacattagcccctgctcgggacttattgactctgagatacacatcattgttggaagatggcagccttgtggtttgtgaaaggtcattgactggtactcagagtggtccaaacatgccgcctgtccagcactttgtaagagcacagatgcttcccagtggttatttgatacgtccctgtgaaggtggaggctgtataattcatattgttgatcatatggacttggagccttggagtgttcctgaagttatacgcccactttatgaatcatctgctgtactggcccaaaaaatgaccattacggcattgagacatttgcgtcaagtagctcaagaggtctcaggtgaagtggttcttggttggggtaggcagccagctgctctgcgggcatttagccagagactgtgcaggggtttcaatgatgctgtgaatggctttgcagatgatggttggtctttgttgggtagtgatggggtggaggacgtgatcattgccataaattcatctccaag

SEQ ID NO: 397 - DNA, 493 bp, Pinus radiata
ccaatatttacgtcagcaattacaattgctgcatgcacgtgctggcaataacaccagatctcttcagcagatggcagtgactgcaaatgacaccagctctgattcagttgtaacaagcgggcaacggcagcaacactcaccgcaacatcctccatacagtgtaagtacctccaggttgtttttcatagcagaggagacattgacagagtttctagcaaaagctacaggaactgctgtggactggatccagatgcctgggatgaagcctggtccggattccattggtgtggtggctgttgcacatgcttgtggtggagtggctgtgcaagcatggggtgttgttagtttggaaccttcagaggtagctgaagccttgcgagataaggtatcttggctttgtgactgccggaagatggaggttctggggacttttgattcaactgatggacggaaattggaactattacatacacagatgtatgctccaataact

SEQ ID NO: 398 - DNA, 436 bp, Pinus radiata
atggggaagacgaagatggagatgaaacacattcaaaaccctagccgccgccaagttactttctcgaaacgcaagaacggattgctaaaaaaggcattcgagctttctgttctctgcgatgctgaagtcgcccttatcattttctcggaaactggcaagatcagcgagtttgcaagccacaacgacatggcaacaatactggaaaaatatcgcatatacacgcaaacagaaacagatggaaacatgggggcttcgtcggtccaaagcgtgaagggatggtttcctaattttctcgagattgcgggattcagtgtttgtggatgatccctattattgcagtgtgggttggggcacgaggggtgcagttgactcgactcatatgattggaaggttggtgaatcacaattgaaagcgttgcacgagaggatggacaatt

SEQ ID NO: 399 - DNA, 419 bp, Pinus radiata
ctcagagctcgacaaaacctacatacattcgtctgtcatccctcccagaaatacctagtgagggcgatcgaggtcgaaaggggcattttacgccattgaagcggtgtgcatagggtcaactctgagaactgattgtgtcttccttcggagggagagggttagcgaggttcagaaagagagagaaagagaaagtagtcctaagggactgtttaaaatggggcgaggtccagtccagctgagaaggatagaaaacaaaataaatcgtcaagtaacgttttcgaagagacggaatgggctgataaagaaggcgtcagagctgtcaatcctgtgtgatgcggaagtggccttaattgtcttctccaacaaaggcaaactctatgagttctccagttccagtatgaccaagattttggaaagat

SEQ ID NO: 400 - DNA, 690 bp, Pinus radiata
cttagcctttccccccaacagctttcaaatatccaattatcctgctttcaaaatcagcctacagactcagaagtgaattgccccagtatttcagaagcaacttcacaggagaacttgaataggtctgatagactaacaagtaaattgtcaggaagtctgagttcttttcgggcttcctcaagggatgggatgctaggaactaaatttctaggtagtgtgaatggccctgagtgtaacaaaccgatgcatcatggtacgaatgcaattggagcagcagagctctcaaacactttaactggttccaaatattttaaagcagcacagcaattacttgatgaagttgtaaatgttggaaagggtatcaagtctgattcagtcaaccatcaaaaatcccaaacatggtttggtgcaatatctgacaaaaagaatattgcaactgaagctactacaaatgaccgaacaacatctgcaataacaggagcttcaatttctgcagaagtaatgaaaaacgagcatgcttttggactcacaccagctgatagacaagaacttcagatgaaaaaggcaaagcttgttgccatgttggatgaggtggatcgaaggtacagacagtactatcatcagatgcaaatcgttgtttcatcgtttgagaccgcagctggatttggggctgccaagacatacacttct

SEQ ID NO: 401 - DNA, 383 bp, Pinus radiata
ttctcgcccgttttttccctgcactcaccacttccatcgccattgctggaaccctagaagaccagtctctttcttttttaactcaggagttaaatcgcaatacaaaactcctgtgctggactctattgtatcatagtattcagcaagagaggccatggggcggggaaagatcgagctgaagaagatcgaaagcacaagcaacaggcaggtgacgttctcgaagcggcggatggggttgcttaaaaaggcacaggagctttccgtcttatgcgatgcagaggtcggcgtcatcattttctctaataccggcagactctacgacttctcgagctccagtatggagaagatgattgaaacatactatcgatttattgaaaaaaatg

SEQ ID NO: 402 - DNA, 846 bp, Pinus radiata
atcaaatctaactggatatccaagtgtaccgttatttggttacttttgttcgcaggatgcttctatccccattttgtgggaggaaattactcagcccatactagagttgaatcctttggggatagacttcctaccattggatttgtgtctgttgcaggctgcataatgtgtttccattttgcgcattgtttctttgaatcttaattgctagttttcctacttttgtatggccttttaggtaacattgttcttagttttacaggtccttgatcggggtgaaaagatagaacttttggttgacaaaacagagaaccttcgatttcaggctcaagacttccagaagcagggaacacaacttcgccgaaaaatgtggtttcagaacatgaaagtcaaactggttgttcttggaattgtctttgtgttgattcttataatctggctctcaatttgccatggatttaagtgccattaatcttgattacttggcagtcctttctagatacaatcctttcgaggcatttatattcattttttggcagcttggcttataatagatgcaggctctctttgaaaagagtatcttttgtgttgtgtctgagtaatgtatttcattcacttggatactctcatcattagatactgattatctatgtttttctctgacgagggacaatgcctcgactcttcatagtttaggttattggcactacccatcagctgtgatgtcaatctcttttataaatatgaatccctgcttttggttttcaattttaacgttcacatagcctgtattatcagcagtgcttaattaacgcgggaaacctttggataaaaaaaaaaaaaaaa

SEQ ID NO: 403 - DNA, 333 bp, Pinus radiata
gccaaattcgcgctctgatggaaatgggaaggctgaccgtagtgattctatgggaacagaagctcgaacacgaacaagattttggcgtagaaggggaagagtacggaggctgaagtacacttggaagtctgctggtcatccctcaataaaaaagcgaattgctgatagcaaagatcagccatgtaggcagtttacaccatgtgattgtcaatccatgtgtggaaagcaatgtccctgcctacgtagtgggacttgttgtgaaaaatactgtgggtgttcgaaaggctgcaagaatcgtttccgaggatgtcactgtgcaaagagtcaatgtcg

SEQ ID NO: 404 - DNA, 881 bp, Pinus radiata
cgcctctcagttctctggtaacgatatgcgtaattatggtgctaaagaagttacttcagggttggctaccggcggtcaacggccgccagctctgcagctaaacctcgcagcccttgatagcagcggagatggcgcagccgctaaagaaaaacgaacgccgaaggttaatccgtattatcttaattcagagtttgtaatggggaaggataagatgccgccgccgccaccggataataagaaagggggaatgaagagaactgctcagggcaagtcagaaattagggaaacaaagagacctgttgctgatcccatgaacggcaagatactgcaagatgtcatgaaacagtgcggatttctgctatccaggctcatcaaacacaagcatggctgggtttttaaagcccccgtggacactgtagcgctcgggctgcatgattataacaccattataaagcagccaatggatcttggtactgcaaaggcgaagctaaatgcaaacgagtataaatcgccacaggaatttgcaggggatatcagattgacgtttaacaatgctatgacctataacccaaatggacatgaagttcatatcatggctgagcagatgttgcagttttttgaggaccggtggaaaccgatttgtgataggtatgaagaggagaagaggaaattgtcatggtcagtaaatgatgggctattacctggggcaagccaaaatatgaagaattttccttttggtgaaaccccaaagaagaatttgaagaagacggagcctcttctgggtttgtcgccacggcctccacctaatgcaaagtccaaggctaatcagactttgcgagcccctgctcccaaaaaacccaaggcaaaagaccttcataagc

SEQ ID NO: 405 - DNA, 434 bp, Pinus radiata
gaaatttgatatatgtgttactagttttgaaatggcaattaaagaaaagactgcacttaaacgtttcagttggcgatacattattattgatgaagcacatcgaataaagaatgaaaattcacttcttgcaaagacaatgagaatctacagcaccaactacaggcttcttataactggcacacctcttcaaaacaaccttcacgaactctggtctcttctcaatttcttacttccagaaatttttagttctgctgaaacttttgatgactggttccaaatatcagctgacaatgaccaacaagaagtggttcaacaacttcataaggttcttcggccatttcttctacggagactgaagtcagatgttgaaaagggtttgcctcctaaaaaggaaaccatattgaaagttggaatgtcacaaatgcaaaagcaat

SEQ ID NO: 406 - DNA, 450 bp, Pinus radiata
aagctcggtaattctgttcatagagcaaatttaagttcaacgcctgcccatactcagattttgggattttgctgaaaatggggcgcggtaaaatagaaaccaagaagatcgagaatagcgtgcgcaggcaggtgaccttctggaagcgccgaggcggtctgatgaagaaagccttcgagctttcagtgctgtgcgatgcagaggtggcgctcatcgttttttctggccgaggaaagctctacgaacttgaaaccagccacagcaacaggaacaagtatgcctgaccatattcaacttctactacacatcaatgccggtggttttaatctacatttattgatcatgaatgtttgcttttgcttcttctaatgttctaggcgggctacatttaatttagagggttcattctggaatctgactagccatcagtttctattctgtgataaggga

SEQ ID NO: 407 - DNA, 376 bp, Pinus radiata
cttggtctcaacttacagactgctgatactgtgatattatttgatagtgattgatgctaaggttatccaggctggtcttttcaacaacacttccacggctcaagatagacgagagatgctggaggagatcatgcggaggggaactaactctttaggaacagatgtgcctagtgaaagagaaataaatcgccttgctgctcgtagtgacgaagaattttggctctttgagaaaatggatgaggaaaggaggcaaaaggaggggtatcggtcaaggttaatggaggagcatgaagttccagactgggtcttttcagtccctacaggaaagaatgacaaaggtgttgaaaatatggattccaatcttggttttgaccag

SEQ ID NO: 408 - DNA, 551 bp, Pinus radiata
aggcggatagtccccatttcaatgaggcggatgcaataaaatccaaaatattagcccatccacagtatccgaacttgttgggagcttacatcgactgtcaaaagattggggctcctcccgaagttgcggcgcgtctagatgcgcttagccatgaatacgaaaaccaacaacatcggtcgagtctgagcatcggaatggacccagaactagatcaatttatggaggcttactgcgaaatgttaactaaataccacgaggagctcacaaagcctttcaaagaagcgatgtcatttttgaagaagattgaagcccagctcaattccctaggcaaaggaacaatacgaatttctccttcagccgagaatgatgaaaagaccgagggaggtgcatcttcagaggaggtcgaggatggcagtggtggtgaaacggactttcaggaagtggatcaccatgctgtagaagatcgggaattaaaagatcatctccttcgtaaatatagtggatatctgagtagtctaaagcaggaattcatgaagaaaaaaaaaaaaaaa

SEQ ID NO: 409 - DNA, 366 bp, Pinus radiata
tgtaagaatgtttttactagattgcaaggaccagtcaaggaaggacgacacacagcactgtttatggagattccaaagagaaatgagaatcccacttactataggcttatagagaaccctattgatgctcgaacaatagaacaacgtcttgaccgcttttcatatgggagtgttcttgactttgctgcagatgtgcagttgatgctggagaatgctatacgtttttatggtcactcttctgaggtcaaggcaaatgcaaggaggcttcaagctctcttcttccagcgtatggctgattccttcccagatgataattttagctcttttaaaactcgaagcttggttgctcttggtcaaagtgcaaat

SEQ ID NO: 410 - DNA, 346 bp, Pinus radiata
ctggtaaattctggtatggcttttggtgcaaaacgatggatagcaactttgcagaggcaatgtgagcgtctcgcaagtgtcttggctagcaatatcccatcaagggaccttggggttatacctagccctgaagggagaaagagcatacttaagttagctgagcgcatggtcacaagcttctgcgctggtgtaagtgcatcaactgcacatacttggacaactctgtctggaagcggtgctgaagacgttcgtgtgatgaccagaaagagtgtagatgatccaggcaggcctcccggcattattcttagtgctgcaacatccctctggctgcctgtgccccccaaaa

SEQ ID NO: 411 - DNA, 393 bp, Pinus radiata
ttttggagtcacagttcgatcaatcatttgaatatccaccggtggagcagttggttaagcagtgtggtaaatttggtttgctagagaggctattaaaacatttgaaagctcaaaaacacaagatgttgatattttctcaatggactaaagttcttgacttgctggaatactatctaagtgagagaggatatgaggtttgtcgcattgatggaagtgttaagttggaagataggaaaaatcagataagggatttcaatgacccagatagcaacttttgtatctttttgctaagcacacgggctggtggtcttggaatcaatcttactgatgcagacacttgttttatctatgatagtgattggaatcctcaaatggatatgcaagctatggatc

SEQ ID NO: 412 - DNA, 830 bp, Pinus radiata
gttaagcttggaacgactaacacttggctcagcagagccgtctcgggacagcacagggcgcagcagcagcagcagcagcactacgcggaacggagcgtggaagagggcaggaaatggtgcggctgcgcggccggctctcgcgactgtattcattctaatttcttgaagctccagaacccggcaagtgcgggttcgagctccgctgccgccaacgcgctgtccggcagatggctaatgcccggacctttgctgaacgacaagattgaggggagggaaggggtcgagctacttggaggagaaattccgggcgagtctattatggcattatccgcacaatttaagactgcgggttctgctgcgccagaaagggggctgttgaatcttcattcggcggatgctgtgaatagcaacggagaacctgtagatagcggaggggccggtggagatagagacggaggggaggaggcggaggatcatgcagcgttgtggcaaagcgccaggataaaagctgacattgtctcacatccgctttacgaccagttactgtccgcacacttggagtgtcttcgcatagcgactccgaaggatcagcactcgatgattgacgcgcaattagagcagtcgcagcatgtcgtcaccaaatattccgtccttggcaacgataatttcctcgtcggcgacaagaaagaactcgatcagttcatgacacaatatgttttgctgctttgttctttcaaggagcagctgcaatatcacgttcatgttcatgttatggaagccgtgagggcatgcattgaccttcagcattctcttctaacactaacaggagt

SEQ ID NO: 413 - DNA, 371 bp, Pinus radiata
aagctgtgcagtacagtctcagccagcagcctctgggactcgatggaatccaacaccagaccagattagaatcctagaaatgttttacaagggaggaatgcgcacccccaatgcagaacaaatcgagcacattacagcacagctgaggcagtatgggaagattgaaggcaagaatgtgttctactggtttcagaaccacaaagccagagaaaggcagaagcaaaagcgtaacagcagcatgcaccaggtagctgctactgcagcaaagaaaactccaacaacaataatggcagataaccctaatgaacttcacaagcccaactccaacggcacatactctctctataatttgcctttcacagcaatgtctg

SEQ ID NO: 414 - DNA, 395 bp, Pinus radiata
gagcactcaaaatggggaagacgaagatggagattaaacgcattcaaaaccctagccgccgccaggttactttctcgaaacgcaagaacggattgctaaaaaaggcattcgagctttctgttctctgcgatgctgaagtcgccctgatcattttctcggaaactggcaagatctgcgagtttgcaagccacgacgacatggcaacaatactggaaaaatatcgaatatacacggaaacagatggaaacatggagtcgtcgtcggtccaaagcgtgaaggtttgactagaatgagaatttgaagtttaacccctgcaaatattatattgaagggaaatcatggtccaaaatcaagtcgccacccaagttaaagtgcaatgtaatcactttagcttg

SEQ ID NO: 415 - DNA, 413 bp, Pinus radiata
caaattcttgtactccacctgcaacgtttcaaggtaatcgatctatgagtgtttttgaaactggaaatgagcgtaaaagaccagctggcaactcctactcggccttggaattgtctgatgacattggggatgaagatggttctgatgattgcatccatttgggagagaaaaaaagaaggttgaccttagagcaagtgagggctctagaaaaaaatttcgaaatggcaaacaaacttgaaccagagaagaaaatgcaattagcaaaggctctaggtctgcagccaaggcaaattgcagtgtggtttcaaaacaggagagcaagatggaaaaccaagcaactagagaaggacttcaatattctcaagcacgactatgattctctgaagcaaaattatgataatcttatggaagaa

SEQ ID NO: 416 - DNA, 355 bp, Pinus radiata
ggagcacccaaaatggggaagacgaagatggagatgaaacacattcaaaaccctagccgccgccaagttactttctcgaaacgcaagaacggattgctaaaaaaggcattcgagctttctgttctctgcgatgctgaagtcgcccttatcattttctcggaaactggcaagatcagcgagtttgcaagccacaacgacatggcaacaatactggaaaaatatcgcatatacacgcaaacagaaacagatggaaacatgggggcttcgtcggtccaaagcgtgaaggttggtgaatcacaattgaaagcgttgcacgagaggatggacaatttgaaaaaaaaggaacgaaacatgg

SEQ ID NO: 417 - DNA, 661 bp, Pinus radiata
ctcctctctgcagagccatacctcctcaatatgctttgcatctcttcttcgttttgaattctcccgtctctgcctaagtaaattctcacaataatatatacagccattctctccatatttccgtaatcggatgatacttctggtttttctgttgctgtcatcgtgagaaagatttgcgtttgtgtgtttgctgaggaaatttagtgttggtagactctcgaagcgtatagctgagagtctttaaacatgggtattatggcttgctcactgggatcccgtatgcctactctgtggagcacaagcttctttcgtcacaagcactttctctagtagagctattatcagaagaactttaggaagcaaggggtagttgtctgtattaaataaaaatggcgtccaatgggattatgttcaatgcttccaatcgaaatttgatcgtcatggtgaatgaagctccatccttcgaagctaattcaagtttggatggagtgatgaagaatgtgtcaaagaggccattctacaatacacttgatgcagacgaagcaggggatgaggatttgctggacgagtgcgttcatcagccaggaaagaaaagaagactttcggtagagcaagttcgctttctggaaaagagctttgagttggacaacaagcttgagcc

SEQ ID NO: 418 - DNA, 323 bp, Pinus radiata
tctagaacgaagcatacgacaacagcgcgcatttcaccacttaggattgatggagcagcacccttggcgaccgcagagaggacttcctgaacgctctgtttctgttcttcgtgcatggttgtttgagcattttctgcacccgtatccaactgatgcagataagcatatattggctaagcaaactggccttacaagaagtcaggtatcaaattggtttataaatgccagggttagactatggaagcccatggtggaggagatgtacatggaagaactcaaggaagaaaaagtggaccaaggtacacacaattctgaagctgaaa

SEQ ID NO: 419 - DNA, 1571 bp, Pinus radiata
gttgttttctgtacagtgtaacatggatatctgatgttcgccacagtgattcttatggatcatacatatatatatttcaaccaggtctgatatatatttgtgggaatcatatctaatactgaaagcatttgctttctgctgctgctgtgatctattcctatgttctgtattcgaatatgatagattacctttactcatatgaagcctctgctgctgctagttagtgtatttatgtttcagtatatatcttattctgctcatgccgggtattttatgctgtggatatggtctgggaattaagagtaaccgaggctcaagaggccgaagctcttagaatcttgatattttaatgtttatctttttaacgtcctttgagatttgacttggccttggctggattggcggatcatgtgtgaagaagattttgttattataaatcaagtttttttatacatgatcatgccaacagcaaattgtaatgagtcatggtcctaatggtggccattcttacagtttgtaggagccaggcatccttcttgtagactttgaggcagcagtcttgttgttcctgctattaagggatatggctatgagctaattagaattgagggcaacaatggaaacgaatctcttaacgcagcaacaatcaggttgccatgatgctgaagaggactatgatggtggttattgagtgttgattaaataacagaccccccaacaatagaaacagaacatcagttggatgctggttatagttgagacagttgggttatgactgtaaaactgaagacattggatggcaatggatttgagtcagaatggctgcatgacagtggttatactttgatttagctggggttgtggtgatggatatatggcagccgtggttttggattttcatgggagtggctgcttgatcaatatatggcagtttctacttatgtggactagtatttcacaaaggggaatgcctatatggaagtagttttataaccatggttatggatttaagtttgatcaattgtatgaaagtgtgtacatggctctagttaagggcacgaggataggaagctctggatatggacttcagcttggtggctgtatgacactgggtgcctttatatgcttaaggatttgagttgggttcattgatttcattttgttgcagataatttgagaagcaatccggggatgaatctaaacgatcatacttacaatttatcacctatggctaattcaggaaatcctgaagagcagattgatgaggatgcagtggatgactttatgaactaccaacccgagtctaaaaagagaagacttacagtagaacaggtgaggtctttagagaggagtttcgaaatcgagaccaagctggaaccagagaaaaagatacagttggctcaagagcttggacttcaaccccgtcaagtagctatttggttccagaacagaagggcgagatggaagaccaagcagcttgagagagattacagcgttctcaaagctagttatgatgctttaaaatctgattttgagagattgcagcaggaaaacaaaaatatccgtgccga

SEQ ID NO: 420 - DNA, 339 bp, Pinus radiata
gattatctcatcacaaaaatctttaatttgctctttgaaccattctgcatcatgtttacaataagtacctgtacaactcacgcacaatctctgatatacagttttgttgcgaggggcaccgtggtgcttgcggagtacacggaattcaaaggcaattttacaggtattgccgctcagtgtctgcaaaagcttcccgccagcaacaacaagttcacatacaattgcgataatcataccttcaactaccttgatgaagatggcttcgcatattgtgttgttgcagatgaatccgttggaaggcaagtaccaatggcatttctggagcgtgttaaggaggat

SEQ ID NO: 421 - DNA, 332 bp, Pinus radiata
tgggtgcccaggcaatattcatgatgacgatgaagaagaagatgaggaggagtgcagcgggactgggcagcaaacgaggaagaagaggaggctgagcttgcagcaggtgagatctctggagaaaacctttgaggttgagaacaagcttgagccagaaaggaaattacaacttgcacaggaattgggcctccagcccagacaggttgctgtttggttccagaataggcgtgctcgctggaaaaccaagcagctcgagagagattacggacagcttaaactcaatttcgagtgccttaaatcgaacttcgatgccatcaagcaggaaaaccaga

SEQ ID NO: 422 - DNA, 461 bp, Pinus radiata
ctgaagtgccgtcgattgttcgggaggatagcgttttcgaagttcgttgttgagttatctcgcgagactgtagaattttagggttgttttccacaaaccgacttttcccgacttcaaatcttgatattgaagtgacatggccggcgagaaaagaaagattaatagaatagctaacgcttcggccaggcaggtcaccttcgcgaagaggcggagggggctgttcaaaaaagctcaggagctatcgattttatgcgaagccgatgtagccctcctcgttttttcttcaactggaaagctgtaccagtactccagctccagcatgaaaatgatattggaccagtatattttgtattctagatcaattcaaaaggatggaaagccaaatctggaggagagtcacgatatccaaaagataaaacaacaaattaaagatattagtcaaaatttgagaaaactgcgtg

SEQ ID NO: 423 - DNA, 622 bp, Pinus radiata
ataatcctctcctacatattgcctcttcctttcctctcttcttcatcatcagtcaattttcccttggagattttacattcttaagaaacagatgggtatggatatggaggactgcaatacagggcttggtctgggaatgagtattggccttgggatgaatctaatgagagaagaccttcaatctcacagacatcatgtcaatggccctcctgtgcagttggatctgctgcctttagctccagtactgccgtcccgtgacttgccatgggggaagacttcacccgggactgatggcgagagatcggccggggaatcgaaagcaaccgtgcccaggcgaatcgatgtgaacaaattgcccgcttcctgttactacaacgaagacacgggcaccattaatgtgtcgtccccaaacagtgccctatcgtcgtttcatgtggactccggtggcgcgatcaacgctgagagcagctgctacggcatgagcgtcaagagagagcgcgaagccaccgaggaattggaggcggagagagcttgctctagggttagcgatgaagaagctgatcaggagggcggcaccaggaagaaactcagattgtccaaggagcaatcggctcttttggag

SEQ ID NO: 424 - DNA, 373 bp, Pinus radiata
attcaaaatgggaaagaagttggagctgaaacgcatccaaaaccctaatagttcacgtgattccttctccaaatgcaagaggggactgctaaagaaatcggtcaagctctttgttctctgtgatgctgaagtttccctcatcattttatctgaaaccgccaagatttacgagtttgcaagcaacaagtcgtgactagctcttgtgaattcttctgatcaagttagagatccatatactgatatataaaagcatactttcacattgcaattggagcagatctagatgcagaagtgcaaccttattatacctaaaggccatcagctgcaaatcaagacccattttctatcttttgagatcgtgatacagagtctg

SEQ ID NO: 425 - DNA, 440 bp, Pinus radiata
ttcgatttcaggctcaagacttccagaagcagggaacacaacttcgccgaaaaatgtggtttcagaacatgaaagtcaaactggttgttcttggaattgtctttgtgttgattcttataatctggctctcaatttgccatggatttaagtgccattaatcttgattacttggcagtcctttctagatacaatcctttcgaggcatttatattcattttttggcagcttggcttataatagatgcaggctctctttgaaaagagtatcttttgtgttgtgtctgagtaatgtatttcattcacttggatactgtcatcattagatactgattatctatgtttttctctgacgagggacaatgcctcgactcttcatagtttaggttattggcactacccatcagctgtgatgtcaatctcttttataaatatgaatccctg

SEQ ID NO: 426 - DNA, 280 bp, Pinus radiata
gtttcactcgttctgccccgtctggattgggctgcactgaaatacattgaacattggagttgtcgagcgcgagatatgggtcagcagtccctcatttacagctttgttgcaaggggcacggtggtcttggccgagtacacccaattcacgggcaatttcacaacaattgccaatcaatgccttcagaagattcctgccagcaataataagttcacctacaattgcgatcgtcacacattcaattatctcgtcgaagatggttcacatactgtgttgttgc

SEQ ID NO: 427 - DNA, 539 bp, Pinus radiata
caacagcgaagccgatttccaaagatggatagggagaaactcatgaagatggctggtgcagtccgcactggcggaaagggtacaatgcgaaggaaaaagaagacaattcataagactgccacggcagatgacaagagacttcaaagtaccttgaaaagaataggcgtgaataacatccctgctattgaagaagtcaatatttttaaggatgaccatgttattcattttgctaacccaaaggtccaggcttctattgctgccaacacatgggtggttagtgggtcatcgcaaacaaaaaaacttcaagatcttttccctggtatcatcaatcagcttggaccagagagttttgccaatctgaggaagattgcagaccagtttcgaagaccggaaccaaatcctgcacagggagaagatgatgatgatgacgatgtaccagagctcgttgaaggtgagacatttgaggaagcagctaagaaagactcctcttaaattttaatagatgagggggcatgggatgtggaacaagctagactgaa

SEQ ID NO: 428 - DNA, 1020 bp, Pinus radiata
cattagcgcaaattcattcccctttttggctcctgccgagcttgggcagattacagagaaaccctagtctcgtggattctcgatcgaaatctgcacggcctgtatacagtcttagcacattcactgagctgccataggtttcttggaactcttttttccgcggctcttgcgagtttcacaggtttttgtttgattgtattttgagggtttttctttcttcgagggttttgttttcccgtttttgtccccttattctttcaagacatctcagaatgatgcagccagccgtcggtgttgctcctccccctcctgttgctgcacccgcaatggatccccagcagcagcaacagcaatggatgatgatgcagcagcagatgcagcctcagcaggctcagcctcagccgcctcctcaggctgggttttggcccccgcaacaccaaccccaaccccagcatgcccaatcgcagcttatggctcagcaatacccgcagcagccgacctcagctgacgagattagaaccctgtgggtcggagatttgcagtattggatggatgagacttatctgcatggttgttttggtaatagccaagaggttgtttctgttaaaattattcgcaataaacagactggacaatcagagggttatggctttgtagagtttgcaagccatgcaggagcggagagagctttgcaaacttacaatggtgcacagatgcccaacactgaacaattttacaggataaattgggcaacctttggcattggagaaaagcggcctgagattggacctgattatcctatatttgttggagatttagcatctgatgtgacagactatttgttgcaagagacattccgaactagataccaaactgtaaaaggagccaaggttgttactgatagggttacaggccgttcaaaaggatatgggtttgtaaggtttggggatgagaatgagcaagttcgggctatgacagagatgaatggggtgttttgttcctcaagacctatgcgaatag

SEQ ID NO: 429 - DNA, 246 bp, Pinus radiata
gcctcttttggtttaggagaaagacgccttctaacaggaccagagcattctatatttgtaggagatttggctccagatgtcacagattatctgttacaagagacgtttcgatctcgatacacatctgtgagaggtgcaaaagttgtaacagatccatccacaggccgttcaaaaggttatggatttgttaagtttgctgatgagaatgagagaaatcgtgccatgactgaaatgaatggtgtttat

SEQ ID NO: 430 - DNA, 323 bp, Pinus radiata
caaggcaagagccaagtctaaagaagcagattatagagacatcagagaaagccatagttttctcccagtggactagtatgctggatttgcttgaggttccactaaaaaaatcgtgtatacaatatagaaggctggatggaactatgtctgtaatagcacgggataaagctgtgaatgatttcaagacactccctgaggtaactgttatgataatgtccttgaaagctgcaagtcttggtctcaacatggttgctgcaagtcatgttcttctgcttgatctttgggtggaatcccaacaactgaagaccaagctattgacaggg

SEQ ID NO: 431 - DNA, 414 bp, Pinus radiata
ccctcggcttcgaagactacgtggagccgctcaagatatatttgaataagtacagggagctcgagggggagaagtcttccatggcggcgccgcccagacagagcgacctgcagcagcaccaccatgtgaacggaagcgatccgcatccatatggccattcgccccacggtcctatggcttaccacgtgcccggaggtgcgagctttcgggcatggaaggtgactgtggcgtgttcattttgttattgtaaagaagtgatagagatggaaatgggtcatggtaatggagactgtaaagtttaaactataaaatgtaaagttgaattcctctctgatgttcagtgtttactttttttgaattttattttttgcccccttttgcattgtacagtctgtagctgtgcatgactgactg

SEQ ID NO: 432 - DNA, 525 bp, Pinus radiata
ctgaaatatcgttaaattcactcttttggtctcagttactgcgtcgccaatatggaaaatctccccaatcagcaacctgaccttgaaattgctcaaacacacgaggatcccgggtcccgccaatttaagggaattcgactgcgaaaatggggaaggtgggtatcggaaatccggatacccaaatctcgagagaaaatatggctgggctcttacacgactcccgagcaggctgcccgtgcttacgacgccgcagtgtattgtctgaaagggcccaacgccaaattcaactttccggaaaccgtgcacgacattccgtctgtgacttctgtttcccgtcaggaaattcagcacgccgccctcaaatatgccttgggccagccccctccgagtttgcagtctctggaagggcacgccgccctcaaatatgccttgggccagccccctccgagtttgcagtctctggaggggcacgccgccctcaaatatgcattgggccagccccctccgagtttgcagtctctgcaa

SEQ ID NO: 433 - DNA, 1196 bp, Pinus radiata
ttcgcttccgaacataagcgcggttccagcgttcgtaacaaacttttgtggcccctttttatcgggagatcgcgggttcgagtccgttcttgtgttttctccgcgtccggagcactcagttcaggtgcccaaaaattgatcgttttcggtcaaatttcgttaatttccgaggacgacttgctagttgtatggttttaattttttttttcaacgaagaaaagtattaaaaattccagcatttacagttttgaggctcatagaccgagggaattgcgatataaagcaaccttctgccctttagctggcaccggcagcagaacgggttggaatggagttttagaagtatcagattgactattcgctgtagaaaaggcaagagcctgtctgaatccgcattggagctgccagatcttgtattctaaggcaaacactggggcgagaaagatttccacggccatttagaaaccgagggctcaaggaccattattttgcaataaaatttctcggatcgtggctatggccttcaccggaacgcagcagaagtgcaaagcttgtgacaaaacggtttattttgtggatcaactgtccgcggatggagtttcttaccacaaggcttgcttcagatgcaaccattgtaagggaacgcttaagctgagtaattactcgtcaatggagggagtgctatattgcaagcctcactttgaccagcttttcagagagagcggcaattttaacaagaactttcagtcccaaagatcaagcaaagcaattgacggtctttctcctgaaatgacaagatctcctagtaaagtgtccatgatgttctctggaactcaagacaaatgtgctacctgtggaaaaacagcataccctcttgagaaggtcactgtggaaaacttatcctaccacaagtcttgtttcaggtgttctcatggggggtgttcaatcagtccttctaattatgctgcactagaaggcatactgtattgcaagcatcatttttcccagcttttcaaggaaaagggaagttacaatcatctcattaagactgcttctatgaaacgagcagctgcagtccctgaggtagcaagtgcagttcctgagatataattttactgtgatctagttacttcattaccatttgtgtttgtattttgaagagtttacacggtatgctagtttgttggggaaaagag

SEQ ID NO: 434 - DNA, 726 bp, Pinus radiata
gttcaattttttcacttgcagtggaaatagaagcctgcaggtacctctaggctaccggagttcaaatcccgcacgatcacactcccttcttttaacattccgagttcgaatccccggaaacttctcgacatggttaagccctcgcaaaaacagaatatccatgtcaatggcaagccggaaagccgctcactgatgtcgcggcaattcaagggaatccggctaaggaaatggggaaaatgggtgtccgaaattcgaatgcccaattgcagggccaaaatttggctgggctcctacgaatccccagagaaagctgcccgcgcctatgactttgcagcgtattgtctgagaggatccaaggcgaggttcaattttcccgactcaccgccggaaattccttgcgcctcttctctatcgccgtcgcaaatccaagccggtgcggcccggttcgccgcagaagaattccagatgccgtcagatgacgacacggcgtcatcgtcctgcggttctgaagcggaatccgacttgccgccggaaattccatgcgcctcttctgtatcgccgccgccaatccaagccgccgcgcccaggttcgccgcagaagaattccggttgccgtcagatgaggacacggcatcatcgtcctgcggttcggtaacggaatccaacattgacagccaacagatttcggcggagcagggttcggcattttgggattcactattcctg

SEQ ID NO: 435 - DNA, 266 bp, Pinus radiata
catcaatggcatcgcttttgttcccgcaggctatgctgcactgccctgcacaatacacagaagcaatgcaccaaatctgcagccacaggtaagggcgggatcaagaggattcgtaggcaacaggaggctgccccttcgccgccagaggaggcaactttgaatcagcaaactccaccgtacagaggcgtgcgtcgtcgcaactgggggaaatgggtgtccgaaattcgagaaccgaaaaagaaaacccgaatctggctcggctcctt

SEQ ID NO: 436 - DNA, 1775 bp, Pinus radiata
acggaccagagatttccaatatcggcgtcgcaagtctttgagtatacgggacgattcccgccgtcgatcgtaattcgtagaatctggacgcggctacaaaatcgctgcccgactccaacgttttctccagttcggccagtgaggaagtttgagggttcacgttattgagagaggacgctatttggttgcgatttcgagtgctgtaagcaggcaacgacgcctgttttgctttagagtttaacagaaaagaagaatgtgtggaggtgctatcatctcggactttataataccccctgcgagccgaggccgccgggtgactgccagggatatatggcccgattttgataagttctctgagtttattaatggaggtgctgcggtggagtcctttgatgtcagcgttgatgtcgatgacgacgaggaggattccgacgatgacgagttcctcgattttgaggagagctatcagaacaagaagaagaagcagcaacagccgatatcccccaccaagggtttcgagcttcctttagctcggggtcttgatggaccggcggccaagagcgcggtgagaaagaggaagaatttgtacagagggatcaggcaacgtccatgggggaaatgggctgcagagatcagggatcccagaaaaggcgctagggtttggctgggtacctttaatacggcggaggaagctgctcgggcttatgatgcagctgcacgaaagatcagaggtaagaaggcgaaagtaaattttgttgatgagccaccaccctccgttaagaaggaaagtaataatgctaagggttccaagaaagggtccagcaagaaaataaaatcatatactaccccaaaggctgactttttcgaaggtttcaaaacggcgaacccttcgattgcccaatacaacttccatcagaaattcccaaaccctagctgtgatgatctagggtatcaaaaccccttgtcgccattacatgccatctgcaatcgaaactttgccgccaaacagtcaagttccgcgttgcctgcatactccactgagttttctgatttcgatgattccgaggtcgataatctggtaccccagcctgcgagttttgaaccgatgaaaaacataaataaacgaaaagggtataattcctttgagtccgacaccagcagcgtgtctgctgatagatcccatatctcgtgggttacagaagtgaaaacccctgaaatatcttctgtaccaaaagccgaagccgactctgatcattatgattttgctgatatgtctacgccggttgcgaccagtgtttcagcaggcagccctgaggtacagcttcctccatttaataatggtttgaacaaatcccctagtgttgaagatggcgtcgctgccgaaaaatcccctaaattggaggaaagttcacagttggagatctctgaggacttgccttctttggaatcatatccgtggttgttccagatgccgtatttcgagggcctggatcagtcgttgcagggtgtgggtattggtgacgcttcgtttccggacggtgagaacgacttgcagctttggagttttgatgccgtgcctatttccgattcagcttattgaattagccttgaatctcttgcttgtaaacagtaattagtaattatgtaagaatcaaggagacttgttatggcttcgttttgcaggccttcgtctaatagggaacttgtttagatttttccccttttttttttttaaattcagtttgacggtgccactgtgatttaatctgcacatt

SEQ ID NO: 437 - DNA, 585 bp, Pinus radiata
accttttggctacatcctcactatctttccatttggtaaagttgaaggggaccgagtgttattttagataaaagttaagacatttatgaaatccaaatctaaaaccagcaaaaaccaaactcagtgtcgatctcatcgatcagagtagaccacaagtatttctggtgtgaatcacatcggagatggcattcgcaggaacacagcagaagtgcaaggcatgcgagaagacggtgtacgtggtggatcagctcacagccgatggttcagtctttcacaaggcctgcttccgctgccatcattgcaatggcaccttaaagctcagcaactattcttcttttgaaggggtgctgtactgcaaacctcacttcgatcagctctttaagaggactggaagtcttgacaaaagttttgaaggaactcccaaagctgtgaaaaatgagaagttgaatgatggtgagattaagacacccaacagggtctctgctttgttttctggcacacaagagaaatgccttgcttgtggaaatacagtttatcccattgaaaaggtttctgtggaaggtgtgggataccacaaggcatgct

SEQ ID NO: 438 - DNA, 351 bp, Pinus radiata
gtttcggcctttggaagagcttctgaatgatgtaaattggaggtcctgttgccggcttagtccatgtattgatttgggttttttcacttttgggttttttcgatttctctggggttttagggtatggatggatctcagaacagcggcggcaatgcggtgcctccgtttctaaccaagacgtatgacatggtggacgacagctccacggactcgatagtttcatggagccccgggaataacagtttcattgtgtggaatcccccggaatttgcacgagacttgttacccaagtactttaagcacaacaatttctccagctttgtcaggcagctcaatacatatggcttcagg

SEQ ID NO: 439 - DNA, 292 bp, Pinus radiata
catgagaagaaggcagtattgtggaacatggatactctcaaagctaaaggttcccttgaagagcattcctttttgatcactgatgtgcgattcagtcctaattcaacgcgcttggctacatcctcttttgacagaacagtcaaagtctgggatgcagacaatccaaactataccttgcgtactttttctggtcatactgggtctgtaatgtctcttgatttccacccgaacaatgaagatcttatttgctcttgtgacggggaaagtgaagtccgttactggagtgttaacc

SEQ ID NO: 440 - DNA, 352 bp, Pinus radiata
aatgggctatttacaggaacttgaagatcagataataggccttcaaaatcttgtgaaacggaatgaacgcttatatggatctggaaacaccccttctggaggagtagctttaccatttatcttggttcagacccgtccacaggcaacggttgaaattgaaatctctgaagacatgcagttagttcactttgacttcaacagcacaccttttgagctccatgatgatgcatatgtgctcaaagcaatgggattttgtgaaaagccatttactgatggtatggatgttactggccatgatagttttgcaaatggaactggattcggagaaaataacatgactataactaacatg

SEQ ID NO: 441 - DNA, 441 bp, Pinus radiata
gacaagagtgttgctgattgatgaccatccactgttccgggagggactggcaggtgcgatccaggccgagccagatttcgaagtcgtcggccaggccgggaccgtggacgagctgcgcgggcttgcgccgcagatcgagccggacgtcgcgatcgtcgacctgttgatgccgtcggtctccgggatcggcgtcacccgcgagctgtgcgagctgctgcctaggtgccgcgtgctggggctgtcggccgtggtcgacgccgccgcgatcgccgagatgctgcgcgccggtgcgagcgggttcgcgctgaagacccagccggcgccggacatcctcgatgcggtccgccgcaccgtggccggcgagagctacctgccgccgagcgtgtcgcgcgaggcgatcgacgccgagctcgccggcggcgccccgccatcgctcgcgca

SEQ ID NO: 442 - DNA, 1056 bp, Pinus radiata
accgagtggagtggggtgtcctaaagggagcgatgtattattgttggtgcgaggaagcagatgagaaggaggggaggccggtgtttgagggttccagatgttccattaccaacgaaaaatccaggtaggtcttcattctattccttcaatcatggatccgccctactctcagtaagctatataagatcattcattcattcaatcaaatccattggagtgcctgttctggtatacttctttgcattggaggtcttggggtttgaccttactcgttcgttcctcgaagcccttggccgcttcccatttacaataacttgtgttgttgcggatttgcacatggtgtatgctgccgacccagaggaaccccggatcgtatattcttgtgactgtaacaaaataattcttgagggtttccgctacggcaagtttgaggcttgggattttgacccagatctgtgttgctgtttgattccgcaagcttggggagatcaggatctgctctttgttgtaaatgtcgatattacccaaatcagattccattcatattagggaagtatgggccgataatctggaagaggagtttaatctgatcagggaaattgttgatgactaccctctgatagccatggacacagagttccctggcatagttgtgcgacccgtgggcaaattcaggaccgtccaagaatacaattatgaaaccctaaggtcaaatgtagacgtattgaaattaatacaattggggctgacgttttctgatgaagacggcaacctcccaaactgcggcacggacagatactgcgtgtggcagttcaatttcagggaattcaacatctgggaggatgcttacgcctccgattccatcgagttgctgcgccagagtggtatcgatttcaagaagaacagcgaacggggcgtagactctcacctcttcgcagagttgctcatgtcgtctgggatcgtcttgaatgagaacgttcgatggatcaccttccacagtggctatgatttcggttacctgctcaagctcgtaatgaatcggagcctgccgcctac

SEQ ID NO: 443 - DNA, 367 bp, Pinus radiata
gagcatgcttgtcctatggcctgtcaccccgggccctgccccccttgtctagtgagcgtgagcaagagctgttggtgtgggagtaaaacgcttgtatcacggtgctcagtactcaacaaagggacgtcaacaaatgccggtgttgggcctgttctatcgtgtggtcaaccatgtggacgtctgctagggtgcgaaaagcatacttgcgagcaagagtgtcacccaggaccttgtccaccctgcgatatcgtagatgttgcaaagtgctattgtggtagacaagaaagggggatggcatgcgggacaggtatagtcgagacctgtgtagtagaaggagagggttcctgggaaggcagatggcaatgcg

SEQ ID NO: 444 - DNA, 553 bp, Pinus radiata
ggtttgtcagatttggtgacgagaatgagaaaaaccgagccatgactgaaagaatggtgtttattgctcttcaagacctatgcgaattaatgaagctacaccaaagaagtccttgggatttcaacaaccttattccatgaaaggtaactattacacacaggcatatggtggtgcagttgctagtcaggccttccagtcagacaatgatccaaataatacaactatatttgttggtgggttagatccaaatgcgacagatgaagatctgaggcaggtttttgggccatatggagagattgtgtatgtgaaaataccagtgggcaaaggatgtggttttgtacaattcaccaacaggtcctctgccgaggaagctttgcaaaagttacacggcactgttattggtcaacaatctattcgcctttcttggggtcgatctccagcaaacaagcagactgcaagctggggagtgcagcctcaagcagatccaaatcaatggaatggtggtggagcttattacggttatggtcaaggttatgaagcttatggttatgct

SEQ ID NO: 445 - DNA, 381 bp, Pinus radiata
gcagtatctgtctcctggcaaatcagctcctttttggctttgccaagatatggcaataacctctcaacaacatcatatgaatgctcttccatataacgaacgcagtgaaaaacgccccaaatttaagggaatccgaatgcgaaaatgggggagttgggggtccgaaatccggatgcccaaaaccagaacgaagatatggctcggttcctacgaaacggcagagcaagccgcccgtgcttacgatgccgccttatattgcttgagaggccccaacgccaaattcaactttccggacactgtaccttcaattccgtcggcgttttctctttcacgccaccagattcagctcgccgccgctagatatgcccgggacgaactgcc

SEQ ID NO: 446 - DNA, 516 bp, Pinus radiata
aaagatagctaggtgccgtaagtctcgcgcagttaaaagaagtcacgaactacaagcgatagtccactcgttttgatgtagtgccagagatcgactcagatagattccgatgttttgggtttctgtttttaaccttggaaggttcaattttacagtttctacgggaattctcatattcaatctgtttggcagattgaactaaagatttttgtccgggtgatttttggattaaattcaaggtcgacgaacgtgaggtgctagggcttttagagtttggatggaacccatggacatcgttggcaagtccaaggatgacgtctcgcttcccaaagcaaccatgtttaaaattataaaagagatgctgcctccagatgttcgtgttgcaagagatgctcaggacttactggtcgagtgttgtgtggagtttatcaatctaatatcttcagaatccaatgaagtttgtggcagagaggaaaaacgaacaattgcacctgagcatgtgctgagagccttgga

SEQ ID NO: 447 - DNA, 396 bp, Pinus radiata
gaaatatcactattttggcttcagagtttctgcaaattgccaaatatggagaatgttcccgagcaggaacctgacaataccatttctctgccacacgaagatcgcggttcccgccaatttaagggaatccgactgcgaaaatgggggagctgggtatctgaaatccggatgcccagatccagaaagaagatctggctcggctcatacactacccctgagcaggctgcccgcgcttacgacgccgcagtgtattgtctgagagggcgcaatgccgaattcaacttttctgtgcccgacattccgactgcgtctcccctttcccgtgagcaaattcagcatgccgccgccgaatatgccttgggcaaagccccttccagttttccctctttcgcaggg

SEQ ID NO: 448 - DNA, 946 bp, Pinus radiata
ggggagacgagatctatctaccgccccctttgtattcatggtctcgggaaacataacaagccctggtcggatcagagaggctcagacaaagatagcgggaatgaattaggccgcactaatttgaatcccggccaaataccgcggcggaggacgaggacgaccacactccggcctaaattcgccgccttttttataattaaaaacataaaaaggccgacgccatgaacgaaccagacgagcacgccgctgctcagctcgtgcagaagcgtagccacccgctggcggaggtggttatgcccatctccgtccgtccgctggcggagaaatgcggcgtggaggcggaggaggagaggaagcgggcggcggagcacaagaagcagcggtccaagaactggacgcgagcggagacgctgaaactcatccgcctgcgagcggaaatggagccgcggttcgcgcgcagcgggcggaagtcggagctgtgggaggagatcgctgaagcgctccgccgagagagcgtggtccgagacgcgcagcgttgcagagacaagtgggagaaattgacggcgagctataaggaagtccgcgacgggcagcgcgacaggcaggacttcccgttctttgacgagctggacccgctgctatctctcaagcctcagaaggcggcggcagcggccgccgctgccgctaccgccgccacggcggcgaattttgtttccgccgagactcccagcaattttccgactgacgacgagatgacggaagaagggtcccctgctgggaagcggagaaaaacgactccaagaggcctctcggcgacggacctggacgctgttcgtgagctcctggagagcctggtgagtcggcagcagaggtttttcgtggatctgctggattccatggagcggaaagaggaaatccgcgagcggattcgtcaagaaaaggagga

SEQ ID NO: 449 - DNA, 1140 bp, Pinus radiata
gctttatggagttcatatcacgtacagcagctgagaagattatgcaaacttataacgggacattaatgcccaacactgaacaagctttcagaatgaattgggcatcatttagcatgggagaaaggcgtctggatggaggtccagattattctatttttgtgggagatttggattcagatgtctcagatttggtcttgcaggagactttccaaactcgatatccatcagtgaaagctgctaaggttgtcatggatgcaaacacagggcgttcaaaaggttatggatttgtgaggtttggcgaggagagtgagagggcccgagccatgacagaaatgaatggtgtatattgttctactagacctatgcgaatcagtgcagccaccccaaggaagtctgcaggagttcagcaacagtattcaggaagagcaggcaatggtggatctcatgcccaaggattcccgtcagacaatgataaacaatacaactatatttgtgggacggctagatccaaatgctacagatgaagatctgagacaagtctttggccagtatggtgatcttgtgtccatcaaaatacctgttggtaaaggttgtggatttgtccagtttgcgaacagggcttgtgctgaggaagcattgcaaaggctccatggtactgttattcgtcagcaaactatacgcctttcttggggtcgaagccctgcaaacaagcagaattctcagccacaggggcaacagcctcagtctgatccaaatcaatggaatggtgcttactatgggcaaggctatgaaagctatggttatgccccccctcctcaagatcctgcaatgtatgcttatggtggctaccctggatatgggaactataatcagcaggtaagctagagttacaagtctctaaagcttggtcacactaatgttgcaagggctgtttatttgcccttcaagttggcttcatttgttttcagtctggaggctgcaattgttttgttttctttaccaggtatagcaacgtatttgctagttgtgtaagcacataaaaattattgcttcatattcaggttttcattatctgagatcaacatatattttccctagttatattacatatttccttataattttaaaaaaaaaaaaaaa

SEQ ID NO: 450 - DNA, 390 bp, Pinus radiata
acatcataccaccgaccttgcttcaagtgctgtcatggtggttgtgtcatcagcccctcaaattatgttgctcatgaaggcaggctatattgtaggcatcatagctctcaactttttagggagaaaggtaacttcagccagctttcaaaggcaacacctacaaaaggggtgactgagaactcagacacagacgacaagtgatcattcgggccagatttttgttgagagagttgtagtgtgtaattgattcatttcatacatttgatatgcaagcctgtatcaagcttatcgataccgtcgacctcgagggggggcccggtacccaattcgccctatagtgagtcgtattacgcgcgctcactggccgtcgttttacaacgtcgtgactgg

SEQ ID NO: 451 - DNA, 460 bp, Pinus radiata
gagtaggaggcggcggcggaggcaagggaagcccgtacagaggcgtcaggatgagaaaatggggaaaatgggtttctgaagtgagggagccgaacaagcggtctcgcatatggctcggctcctattccactcccgaggccgctgccagggcctatgatactgccgttttctacctcagaggaccctccgcgactctcaatttccccgaggaagcacgtaaggagcagcagagcgacctcaggctttcgcagctcggggagctctcaccgtcctctattcagcggagagcggccgaggtcggcgcggccgtcgaccatgccatgcaggcgggcccggttcctgctcagaccctgagggaaataaaccaagaaaatgatatgaagaacgccttgagctcaaaattgagcgagggcaataatttcaagatcgaagcaaaaaataatatgaggcagcagggctt

SEQ ID NO: 452 - DNA, 1116 bp, Pinus radiata
gtagatttaaatgcttttttgaaatccggttactcgcaagattatcaatcgggactgtagccgaagctttgagaggttgaaattcagacttttgctccgaactgttctgctgaaacaaaatccagtattgagctaggtttagaatcgggtttgctggtcatctgggagaggcgatccattcagcttcgcaggcccccgaagatggcgttcgccggcacaacccagaagtgcaaggcatgtgaaaagacggtctatttggttgatcaattgacagctgataattctgtttttcacaaatcctgtttccgctgccatcactgcaatggaactttaaagcttagcaactattcgtcgtttgagggagttctatattgcaaacctcattttgaccagctgtttaagagaacaggaagtttggataaaagttttgaagccattcctagagcatcaagaaatgacaagatgcatgagaatgagaacaggacacctagtagggtatcagcattgttttccggtacacaggataaatgtgttgcatgtgggaagacagtgtaccccattgagaaggttgctgttgatggtacatcataccaccgaccatgcttcaagtgctgtcatggtggttgtgtcatcagcccctcaaattatgttgctcatgaaggcaggctatattgtaggcatcatagctctcaactttttagggagaaaggtaacttcagccagctttcaaaggcaacacctacaaaaggggtgactgagaactcagacacagacgacaagtgatcattcgggccagatttttgttgagagagttgtagtgtgtaattgattcatttcatacatttgatatgcaagcctgtacaatagcctgtgactgttaagggcattcttttgtctccctgttgctatttgggtttccggtgtgttcattttcacttatttttgtgttttagctggaagaatttgagagggtagaattgtgtcatcgctatggcttgtgcatgactcatgagccagcagttgagacttttatttattagttatagtactatatctagtcgagttctcaataaaagatagtgttatgctgttgggcagcaaaaaaaaaaaaaaaaa

SEQ ID NO: 453 - DNA, 439 bp, Pinus radiata
ccggttcctagttcgaatccttgccctaacgcagtcccgtgttttaagactcaatctttagtgactcccccgcaacatggttaagcccttgccaaaacagagcagcccgagcggatcggaaaactgccaaataaagtcgcggcagttcaaaggaatccgactgagaaaatgggggaaatgggtgtcggaaattagaatgccgaattccagggccaaaatctggctgggctcctacgactccccggaaaaagctgcccgcgcctacgactttgcgttgtactgtctaagagggtcgaaggccacattcaattttcccgactccccgccggaaattccatgcgcctctgacctgtcgccgccgcaaattcaagccgccgcggccaggttcgctacagaagatttccggctgccgtcggaagaggacgcggcgtcctcctct

SEQ ID NO: 454 - DNA, 481 bp, Pinus radiata
gcaattcctagtctcatttcagtgattcactcactgaaattattgttagaatcactgttttggccccagagcttctgcgtcgccaaatatggagatacgcctccagcaggaaaacgaccaggacattgctccgccacacgaagatcgcgtgtcccgccaatttaaaggagtccgaccgcgtaaatgggggatatgggtatcggaaatccggatgccgagatctcgacagaaaatatggctgggctcgtacaaaaagcccgagcaggccgcccgcgcctacgacgccgcagtgtattgtctgagagggtcgaacgccaagttcaatttccccaattctgtgcccgacattccgtctgcgtcttctctttcccgccagcagattcaactcgctgccgccaaatatgcgttggatcagtccccttcaagcccgccgtctctgaacaataataaagaggaacccgcgtcaccgtcgcagtcgtct

SEQ ID NO: 455 - DNA, 382 bp, Pinus radiata
ctcccacctccatttcactctgccgagtccattactctccctatcgtcgaaccacgtctttctcatcgaccaacaatgactcagcagacaacctcaccaacagttagtcccgccgcacttgctcttcccacttctgcctcatccacatctgcaaagtctgcagctgttccagtaccagcccaagccaaccctcgcaaacgtcctcgttcggatctctccgcagaggagaagcgagaggctcgtgctcatcggaacagaatcgcagctcagaactctcgtgacaaacgcaaacagcagttcactagtctcgaacaacgagtcatcgacctcgagaacgagaaccgccaattacgagacgctctcgccacttcgcagccgaacc

SEQ ID NO: 456 - DNA, 201 bp, Pinus radiata
aacttctgactatttttgaagctgtatatgtacataaagggatcgttaatgcagcgaaagtgcttaatctgaccccctcggcaatcagtcagtctattcagaaactgcgcgttatattccctgacccattgtttattcgcaaaggccagggtgtcactcctaccgcatttgcgatgcatctacatgagtatatcagtcagg

SEQ ID NO: 457 - DNA, 435 bp, Pinus radiata
gctctggggacttggtgttttctcccaatcctaaaactaaatgttattatctgaaatagggaaacaagattacagcagcagcgaaggacaaatgaaagggccgcaggggattagcaatgctcaaaacacttgtaccaaattccgaatgccaacatcagagaacttgattcccattcgccttgatattgaaattgatggactacgtttgaaggatgcatttacgtggaatgtaaatgatccagattcagagattcatttatttgcaaggagaaccatcaaagatttgaaatatccgggaagtttcataacaccagtagtacaatctattcaagcacagttagcagagtttcggtcatttgaagggcaggaaatgaacacaggacaaaaagtgctcccccttaagcttccctaaaatttagtatatatatcctcctt

SEQ ID NO: 458 - DNA, 654 bp, Pinus radiata
aaagctagataacgtttcgttttaaatacagcgcggccgaggcggccggtcagtcaacggggtttctagtgcggtcgtctatattttctactctcctttccactctgcaaaatcagaccttcatccattccccacggcattagattcaatccattctattaggctcctttaagcgaggtcgcgggttcgaacccgatcgaatgatgcgaattggataccgtttggtgtagaattctgatagatttcgtgcgatggagggttcacagaacggcagcagcaatgcaccgccccctttcttaacgaagacgtatgatatggtggacgacccggccacgaatgctatggtgtcatggagccccggaagcaacagttttattgtgtggaatcccactgaattctcccgtgttctcctccccacttactttaagcacagcaacttctccagcttcgtcaggcagctgaatacatatggttttcacaaaattgatccggaacggtgggaatttgcaaatgaggggtttctgcgaggtcataggcatttgttgaaaaacattcacaggcgcaagcctgttcatagccacagtcagcagaaaggagagagtttgtctggaggatcatgtgtggaaatcaaacaacttgaagatgagactgaga

SEQ ID NO: 459 - DNA, 675 bp, Pinus radiata
aattgaatcggccatggttttgtatgaattgttacatgtacagcagattcagcaaatacagcagcagcagtttcaattgcaacaacaacaaatagcagcagcggcttcaatccaccatatgggtcgaaaccctctgggtcccagagatcagcccatgaaacttcatggcagcagcctatcaaagccggctaagctttacagaggcgtgaggcagcgccactggggtaaatgggttgcagagatcaggttacccagaaacagaaccaggttatggctggggacttttgatactgcagaggaagcggccatggcttatgacaaggctgcttacaggctgaggggtgactatgccaggctcaattttcctcaccttaaacaccatttggaagcaaattccttcgccccctggactggtaattctgtgctgccatcgtctgtggatgccaagctacaagcaatttgccaaagcttgaaacaacctttggaaagcatgtctaagaccgaagaatcagaagaaatttcatgtgcatatgagaattcgggctctcttgggtcggtgcgggatgaagatgcgaagaagaatgatgttgtctctgtcaagtccgagacttgtgattctgatagtagtgatgattccaccattacagcgttgaattcatctggggatcagaatcc

SEQ ID NO: 460 - DNA, 1014 bp, Pinus radiata
cccggatagaagcccccggtcggagaacgaatccggcggcggtcacatgggcggcagcgcatttctctgtgaaagagcaggatcggttcctgcccatagccaacgtggggcgcataatgaagaaggccctgcccgccaatggcaaggtttcgaaggatgccaaagaaactgtgcaggagtgcgtctctgagtttatcagtttcatcaccggcgaggcctccgacaagtgccaacgggaaaagagaaagacgatcaacggcgacgatctgctgtgggcgatgacaaccctggggtttgaggactatgttgagcccctcaagatctatctccacaagtacagagaaatggagggcgagaaggtctctatggccaaacaaggagacccgactccttccaaggaaggtaacaacgccattaatggctcctcaattgaaaaccctaatgctaatgcctacagtggtttgaaccccggcggttataatagggtacagtcgcagtctctgccacatatgcagcaggctgcctatgggcaaccgccaggtggaatggtctatggccaccacggccacattatgggggcttacaatatgaccgccccaaatagcagtggtggaaatagcagtggtcagcaacagcagcaagcccccagaggccaatggtagaaatatttactttttcttttctgtttttctaatttttacgggtcatgtggggacagctggtgccttagttaaagtagaatggcatcaccaacccaaccaattctttactagtttttggctgaaatgattccatctcttgcatattaaagaagcccctcaagctcaggaggggactttgaagtgctaaagaagtctctcaagctcagaacactggaaaaatgggcgggttgttgttactaactgttctgtaaaaatttaccagaaatgttgttcaaactgtctgtatttagtaggtactgaatcttagtgaatctgcttctgtatatctattttcgctccatttggaagatag

SEQ ID NO: 461 - DNA, 301 bp, Pinus radiata
ggctgcaccactgtagtagaaactttagccaagtggcaggagctgaacagccaggtggaaagctcaaaagatggcgcgaaaagactcaggaaagcccctgccaaagggtcaaagaaaggttgcatgaaaggaaagggtggtcctgataatggacgttgcaactatagaggagtcaggcagagaacgtggggaaaatgggttgcggaaatcagagaaccgaatcgtggaagtcgactgtggttgggtacgttctcttcagcggaggaggcagcacgtgcttatgatcaggctgcgagggtta

SEQ ID NO: 462 - DNA, 384 bp, Pinus radiata
gttcagagggtaagtgaagattcgaaaaacaatggagattgtggggaaggccaaggaagatgtttcactgccaaaagcaactatgaccaagatcatcaaggagatgttaccagcacatgttcgtgtaaccagagatgctcaggatcttctagttgaatgctgtgtagagttcatcaatttaatctcgtcagagtccaatgacatatgctacaaagaggagaaaagaactattgcaccagaacatgttctggaatctctaaagattcttggctttgggagctatattagggaggttaaagctgcttatgagcaacacaggattgagaattgggattgtccaagagcaggaactagatggagtaaaaacagattggaaatgacaga

SEQ ID NO: 463 - DNA, 484 bp, Pinus radiata
gaatatcaatggggttgctgggggagttgccaaagagaaaaaggtaaattttccatggtgtgcattggaaaagcaagtagggacatcatcttttgatccaaatttggcttctagcaaacaagcaatggatagtctaatcatgcagcaactgcctaccttcctccaatattgcaaagatctagaagagggcagacagtcatggtttatgcacaagaaggaagctacctggaggctcagtcggcttgagcagcagcttgaatctgagaaagctcgcaagcggagagaaaaaattgaagaggtaggttcaaaaatacgtgccctcagggaggaagaaataacatatcttgacaaactggaaactgagtgcagggagcagctttctagtctccaaagggatgcggaaatgaaggaggctaagatgatggaattgtgggctaccaaacatctgcagttgacaaaattcgttgacagtgctttatcagtt

SEQ ID NO: 464 - DNA, 1434 bp, Pinus radiata
atggttttaggttttaaatgtagagcaggacgtgcctacttttgcttcatttatgcatatgtcttttgttgtcactattcgtctttaatccccactttgcctgcctggagagaagaggagaggaccctgccctgctatttggccttgtgagcgattcaggagaaatggggtggcaacagcagcaaggaggagagaatgaaaattgaataaaacgaaggatctgaatcccccttgcgcgcaagcaatggctcgagagaccaattcttttgccctactgggcggagatgacgaccaaggcgatgatgatctcatggcactcatcaacagcgcggccaccctcaagccagaaaagaagcccaagactactgccaagaaaaacggccagcagcagccgccgcccccccagtctcagcctgctaaacttccttccaaaccccttccgcccgccgaagccgtgagggcggatagaggaagaggaaggggcgggcggggccgcggtggaggccgtggcagccgctttgagggcggtgaatacaacaccgagagcaacggatatggtggtgggggcggttttggaggcggccgaggctggggtcgcgatgaggactctgggaaccgaggttggggtcgtgaagaggacaccggaggccggggttggggtcgaagcaacggcgaagaggacaccggtggccgaggttggagtcgaagcaacggtgaggacgacgctgctgcaggcggaggacagagccgcggcagaggacgtggacggggcaggggccgaggctttggtggtcgtggtagtggacgcttcggtggaggcggcgacagctatggctacgatgccaatggacaggaccgccctccccgtcaacagttcgaagacaccaataccttcacaggcacagacaactgggatacccctgaagtgtcagtcgttgatgaagctaaaaatgtggagcctgaacagaagaaaccagaagaagaggctacaccaggggttacctctgaaaataaagataacaaagaagaggaggacaatgaaatgactcttgatgagtatgagaaattattgaatgagaaaagaaaaacattggaagctttaaaaaatgcggaaagaaaggttattctggacagagattttgagaaaatgcagcttgttgataagaaaaatgatggcattttcatcaaactgaactcagaaaaggagagacaaagaaagaaggagacccttgaaaaagaggaaagagcccgtaagtctgtgagcataaatgagttcttgaaaccagctgacggtgagagatattttaccccatctggcactcgtgggcgtggccgtgggcgtggacgaggccgtggggacggtgttagcactagaggaggttttggagggaggtacagtgatgctgatcaggttgctgctccttgcattgaagg

SEQ ID NO: 465 - DNA, 364 bp, Pinus radiata
acacatgggcacaagaagaagaaaagagcccacgagccattgggggggagaaaggtgggaggggacttcgccagttcagcatgaaagtatgtcaaaaggtcgagagcaagggtcggaccacgtataatgaggttgcagatgaattagttgcagaatatgcaaatcctaacagtgcgctcatttctcctgatcagcaacaatatgatgagaaaaacataaggcggagggtgtatgatgcattgaatgtactgatggcaatggacatcatatcaaaggacaagaaggaaattcagtggaaggggttacctagcacaagtcctaatgaccttgaagacttgaaggcaaagcgcatgggattgcgggg

SEQ ID NO: 466 - DNA, 237 bp, Pinus radiata
gtcctatgaagctttacagaggagtcaggcagaggcactggggtaaatgggttgcggagattcgcctcccacgaaaccggacccgcctctggcttggcaccttcgacacagcagaagatgcagctctagcatatgatcacgaggcttacaaattgagaggtgagaatgctcgtctcaacttccctcatctgtttttaaacaagggatctaccagccctaaagcttgttcagttgcgg

SEQ ID NO: 467 - DNA, 578 bp, Pinus radiata
tctttctcgtgccgaattcggcaccagacagaaccaaccctaattttgatagacacagcagggtgtgatatggaggagaaaaaagatgacgaggacagcacaatgaatgaaggcgaggcaacagtgacactaatgcatgcaaaaaaacttctagaaagtggagttaatccctctgatattggcatcattacaccttatgcagcacaggttgggctgttaaagataatgagaagcaaagagatgaagttgaaagatttagaaatttctacagtcgatggctttcaaggccgagagaaagaggcgatagtcatatcaatggtccgttctaatgcaaaacacgaggtaggttttctaaatgaccgcaggcgaatgaatgtagctgtgacacgtgcacgtagacaatgttgtattatttgtgacactgaaacagtgagcagtgacaaattcctgaaacgccttgtagagtattttgaggagcatgcagagtatttgagtgcctcggaatatcttacttgattgtgacagcttgaaaatctgttgcctacaataacccatgatacactgagactacttttttt

SEQ ID NO: 468 - DNA, 432 bp, Pinus radiata
gcgctccttacggttctacgcatggtattcgagcttgcgacgcgcccactttcttgcgagctcattctgttcggcctcagaagggtctggccggccaagcttgagcttttgtatggctgaagctgttgccatgtttaacgtgataatgagaaaaatgctcagaccaagtgtcaggtagtacgagctcgtgccgaattcggcacgagctgggatacagtagaagtgccaagagatgtaaggagaagtgggaaaacatcaacaagtatttcaggaaggccaaagagagtaacaagaaacgtcctgagaatgccaagacctgcccttactttcaccagttggatgctttgtacaagaagagaaatctgggcaacaggcacaacaaaattatggtcctgagtattttctctgttgcttccactgggctgttcatgc

SEQ ID NO: 469 - DNA, 657 bp, Pinus radiata
gtttttccgcaggaagttttgatttgagtaggaaatcctttggcctcctggagctttgatttgctcaggaaaccctagcccttcggttcctgaagctttgcttttcgtaggaaaccctttggcaccggtaggcgatggctcccagcaacaacagaagagacgacaatggagcacgaggagttcacttcaggggcgtcaggaagaggccctggggtcgatacgcggcggagattagggatccatggaaaaaagttcgtctttggctcggcacctttgacacggccgaggaagccgcccgggcttatgacactgccgctatctccctcagaggtccgaaggcgaaaacgaattttgcatactcctcgccgtcctcctcatcatctctgcacaataatcagagcagtagccaaaacagcagcacggtggagtcctggccctctgcggcccctgtgactcgatccggagacctcgagcttcccgcttcttttctccctcgcctcggagtttccaccgggcggcgggttttaaatggtggaaacccccggtccgggcgccggcggagtctttcggagaaaaacagcggcagaaaagctgaaggcgccgaggcgcgaaccaccctaagcgattctgattcttcttcttctgcggttctagacg

SEQ ID NO: 470 - DNA, 581 bp, Pinus radiata
gtccagcaacagcagcagcagcatcagcagcatcagcaacaattactgcagcatcaacagcagcagcagatggcagatgctgctgctgcaatctatgcctcatctgtaaagaggcagggtaatgggacaatgatggggcagggtaatggaacaatgatggggcagggtaacggggcaatgatagggcagggtaatggggcaatgatagggcaaggtaatggggccattgatgggatcaccccttggaggaggacttggtctttcccctagaatgggtggagggattgggaatggcctacaaggaggattgggggtgggcttggcgggtctcggagctactgcgcttaccattggagcagcatctcccgccaaccagctttcttctgatggtatgggcaacagccatggagacaactcaacagtatcgccaattccttatgggttggacgtaagtgtaagaggcaggaaaagaggtggaccggtggagaaagtagttgaaagaaggcagagacgtatgataaagaatagagaatcggcagcaaggtcgcgagctagaaaacaggcatataccgtgaattgga

SEQ ID NO: 471 - DNA, 451 bp, Pinus radiata
ccaaaatggagattgagaaacaagaggaggatcctctggagattttctgcctccacccccgacaactaaatgctcagaggagctgcagaataagatcaccaaatatattgctttgaaaagtgctggaagaagcttcaacaaagaactacgcaattcaaagggatatcgtaatccagatttcttgcagcgtgctgtgaagtaccaggggatagatcaaattggtagctgcttcaaaaaggaaatatttgatccacatggatatgatccgagtgactattacgatgctttagctttggagctcaagagagaatttgaaagaagagaacaagagaagcaaaagaatcaaagggtagattttgttcatggagctgtacaaactacatcggtacagtcagtatcaaagccaattgtgcaggtcatgggtggtcaaaaggtgcctgttgttggggta

SEQ ID NO: 472 - DNA, 1286 bp, Pinus radiata
gacgttcctctttacttttacaacttgtaccgctggccatgaaaacagccggggagatctgaaattttccactaaagtttgtttttttgctggttctcgcttgggcctccataggacctagctggacacctcgaatctcctccggtcattttttgttttgacagggccggtttggtgattagggtttcagataacaggaggacaagtgttcgaattcgagagaagccagaatgagctctccgcagagcaataagtggctgtcatatttcgacgagccattgttggatgatgtaggcgtggggcagccggccaatccattcttctggtgcggtcagggcataaatgatcagcccgacgtaagtgtagaaattgatggccccaataaggacatggacgagcaagataaattatgtcctagaaagaggtcacgggaagaatctagtggtggacctgggtcaaaagcttgccgtgagaagatgcggagggacagacttaatgatagattcatggagctaagctctgtgttagaaccgggtaggcctcccaagacggcagacaaagccacaattttgtctgatgctgcacgtgttatgacccagctacgaactgaggcgcagaacctgaaagctgagaatgaacgactgcaggaagccattaaagatctgaaggcagagaaaaatgaacttcgtgatgaaaagctgagaatgaaagcagaaaaggaaaaattggaccaacaagtaaaagcaatggctttgcctacaggctttgtgccgcatcctgcagcatttcatgcggctgctgcttttgcagcccaaagtcaagcagcagcaaacaaaactatgcctgttccaggatatcctggaatggcaatgtggcaatggatgcctccagctgtggttgatacttcccaggatcacgtgctaaggcctcctgttgcttgaagcaggctcttattttatattccaaactggtgctactatttctttggccctcgaaacgaccttagtttctttggtatccaagttttagatgctaggtgccattgcatcagttcaatattctaattttttttatattgtgccatagagataattgaggataattacaattcatcctgatgatgaaatggattaactgctgtattatgaaaaattacactggagctttgcagaacaattattaatcctttgttcatggtcatgacatgtcttgaactggagatcgctcgaacacttacagttggtataaacatcttgacatttcgttcaaaaaaaaaaaaaaaaaaa

SEQ ID NO: 473 - DNA, 1358 bp, Pinus radiata
caaatttccaaaaccccagccccccacgtcaaagtgatgtgaagggacaaatcccttgaacaaattttcaaatgctatttatatatgaaatgacggtggagcgagagccacgggaagtagcgggtagaaggcaggggtataggctttttgggctgtgtctgtcgcttcgagacgacttctcattggagcgaaacgcctctcggcatttgggtcagtgaaccaacgaacgctggcttcaaggttttcgttttatctttcttatttcacttccttggatttagtttcctttcgatcctgaaaccgattcattgtgtgagttttccgcgaattaactgatcagggtttcggcctctgtatcaaatgttttggggagcttttctggtttgaaatgacgaggcccacatggcgaaatcactgttttccctaagctgaatgactacaacccatcttcagggcatctataactgtaaatttcgatacctgggtcgatccgtgtgcgaccctcgtccgagaaaagagagcacagcagcattggtaggtctcggtttcaatacacagctggggaagaatttcaaaataaaacgcaagcctcgggtttgggctccagaggcacacacgacaataatacatcataggagtagcggcgtaggtcgtgtgttcaaaccccatccagggaaaataccgtgaagctcgcttgtcgcaagttcgactgacatcgactgaattgcatttcttagtcggcaaaaatattaaagagtcaagacaaagagggggttacgggagcaggctgcgggttcgatcccaagataaggaaaaaagaaagaaaatttcatgaattgggcctgtaggttccagtcacaaaattaaaacctatcggtctcgtcttcgagctaaagttggggaaaaaactaagctctcagggaatgggttcccgcacaatgctgtcctctaatggtggccggacacctcagttccaaccactcgttcgtcagaattctttatacaatttaacgctggaggaggtccagaaccagctcggggacgccagcaagccgcttagcagcatgaacatggacgagctcctgaagaacatttggacacaagaagaaagccaggctatatccatggcgatcggcaatgggcccatgaacggtgttcctcccaactctgcccctgccagcggtggtttgcagcgtcaggggagccttacaattcccagaactctcagccgcaagactgtggacgaggtgtggagagatattcagcagagccagggaaagagtaacgaagagaagaagccgcagcagaggcaatccacctttggtgaaatgaccctggaggatttcttagtgaaagcc

SEQ ID NO: 474 - DNA, 517 bp, Pinus radiata
atatggcttcaggaaacgttgatccagatcaatgggaattcgcaaatgaagattttctccggggacaaaggaatttgttgaaaaatattcacagacgcaagcctatgcacagtcattctcagaatccccaacaaggcgtatgtaatgatgctataaaatatgaactggaggaggaaattcagaggctcaagagggataagggtctgctcatgatggagcttgttagaattaggcagcaacatcaaggtaccgagatgcatatgcagaccttggaggagcgtttgcaagccatggaacaccgccaacagcaaatgatggcatttctggccaaagctgtacagaagcctggatttgtggcacagcttgtgcaacagagtgaaaacaataagcttcttgaagcagctaataagaagagaagattacccaagcaagagaactgttcagaggctggggaaactgagttgacagacagtcagattgtgaagtatcaacctgcttcaggtgatgaatgtagtgc

SEQ ID NO: 475 - DNA, 337 bp, Pinus radiata
gttgctgctgcttctgcttctgcttctggtactgctgttgctgcgtctttgccagtgaacggtgctgctggggtcagatctagtgttgattcggagcattcggatatagaggcgtcttttaaagaggccgaatgcagtcaggccattgttgaaaggaggcctcggaaacggggcaggaagcctgccaatggtagagaagaacctctgaatcatgtagaagctgaaaggcagaggcgagagaagttgaaccagaggttttacgcactccgcgctgtggttcccaatgtgtccaagatggataaggcctctctgttgggtgatgccatttcttacatta

SEQ ID NO: 476 - DNA, 362 bp, Pinus radiata
caatatcatatcccaactcacgaaatagacaatctctttttatgatggtcaatgataaagaaaagtaatggtagattctcgtaaccaataaccttttaatagctgccaatgagtccaaattcattctgtcgatgcaatattgactgtatgcagaagaatcgagcactgtcacgcatctccaataccagcaaagtattcttgagaatgacttgaggtcgaaactgaaggataatctccaacagccacagaattctgggaagaagagacgctatagaggcgtaaggcaaagaccgtggggcaaatgggccgctgagattcgagatccaaaaaaagcagctcgagtatggctgggcacctttgac

SEQ ID NO: 477 - DNA, 612 bp, Pinus radiata
agaacatggccaagcacactgtctgcgcctcttttctcaacgaaggagacttcatttgccctccttacgaagatggaattggtctagaatggctgtcggacttcgtggaggattcctttgcagctacaggaagttcgaattctggttccttggctgacttgtctaaggacaaaatcgacgacaacagggagaagaagaagcagaacccaaccgatgaagcgataatccctgaaataccgcctataaaggagactcccaggtcacagagggcggtgcccgggcgggctcgcagcaagcggcgcagaagctcaggagccccaattcgcggttggtctacttctgaagattacgcattgcagaatgagggcggcatgaaaactgtaacaggagcggacgctataaatcattaccagtcctcggcgccccagcagcagccaaggcgctgcactcattgtctcagccagcgaaccccgcagtggcgattgggcccgttgggtcccaagaccctgtgcaatgcctgcggtgtgaggttcaagtctggcaggctcttccccgaatacaggcctgccaagagccccactttcattcgatacattcattcaaattcccata

SEQ ID NO: 478 - DNA, 680 bp, Pinus radiata
tggaaatgctgccaggcgtcctcatgatgtgcttttgaagttagaaaagttgagttcacagacaacgcttgaatcactacaaagactcatcgttcaaaagaaatgtctcctttttggcaaaaaggtaggaataagaattgacggaaagaagaccgcaaatacagaaaaagtgaatgaacggaacacaataccaaggatcatttttggggcattaacatttacaagaaaccgccctcatgcattatctaaaaatggaagcatagccgacacaagaagaaatatatgtggtgcacctcaagaggatggaaccatttgtacagctatccctcttaaaagcagaaaacggtgtcctgatcacaagggacaaaaaggccagaaagagaaaaatttatcaaaaattaacatcagtgcaaacgttgaatcaaggaaccaaggagttggggaacatgaaaatgaatatagatattgtggagtccttcttaaagatggatcaacatgcaagattatacccgataagggcagaaagcggtgtaatatccacaaggggatgcgcattcctggccaggcaaaataagcatttttatctggatcagaaagtgttaatgttccagaaatcagatgttagagtgcagaagagaaattacctactcctaaggaatgtaatcatactctaggttggc

SEQ ID NO: 479 - DNA, 544 bp, Pinus radiata
gttttatattttaagtggaaaatagcttggctggctagggtttcagtatataaaaccctggttgtttgaggggcgtaatacactcagttgatgttctagcgcatagatatatacacagactgtgagctttattctctgtgaacattctgggcaatgctactgagtctcagaccgcggaattaatacagatggcgctgaaggagaaactcctatcataaatatataaaaaggatttgtttttgacagtggaacagagccagttcaaagcaggcggcaatggcaacttccaatccgtttgatctgctcggcgatgacgacaatggcgatgtctcgcagctcgtcttcgtccctcaggagaagccgactgttaaaaaggcctctcagcctgctcaaacggcaacggccaagctcccgtccaaacccctacctccggctcaggctgtgagagagtcgagaaatggagtgggcagaggaggtcgaggcgggcgaggaggagaccgcaatcaagatgtgggctattagcaatcgtggccgtggcagcttc

SEQ ID NO: 480 - DNA, 971 bp, Pinus radiata
ggaagttctaggtcacacaccggagactcttgagaagtcttcagacaaggtgtggagaggtaaaggagtgcctggtgcgggacaggaacgcctctgcaagatgaatagggagaagcttatgaagatggctggtgctgttcgcactggtgggaagggtaccatgcgcagaaagaagaagacgattcacaggacaacaactacagatgacaagaaacttcaaagtactttgaaaaggataggagtgaatgcaatacctgctattgaagaggtcaatattttcctggaggattctgttattcattttcaaaatccaaaagttcaagcttcaattgctgctaatacgtgggtggtcagtggatctccacaaacaaagagacttcaagatcttcttccagggattatcaatcaacttgggccagacagttttgccaacctaaggaagcttgcacagcaatttcagaaagaagttcctcatcctgctgttgaagaagatgacgatgatgtgccagaacttgttgaaggagagacatttgaggaagcagctaagcaagaatccgctgcctaactgagttgagcttttataaacgattgacagttaagggagcactcaataatgtgttttgaatgtgatattagttataagtatattgtattttactgttaaagtaaaactatcaggggcatcttgttattatgatacagttcaaattttgtttttcctttccccttgtctcataaatttttcttcatgcaagtggattcctgtgaatgcaagattggtttgaattatgcaaattatagatttgtttttgacttcgattctgttatggtaaggtcttttcccccctccagtgtatggttaaaatgttgtagtacaaacaatgtccccaattagctgcttcttgcttggaattgtgcatgcgttgcaccttttggtattaaaatttttgcttgtctataaaaaaaaaaaa

SEQ ID NO: 481 - DNA, 710 bp, Pinus radiata
cttggagctgcctgctgaagtctttgatcgctgtaagtctgaggttgagattaatcaggggcttggcagatttggtatcaggtagaagctagagggtctctagtaatcgactctgcgcagtcccagagagaaatgaaaatgaatctcgaccttttgtagaagagtttcctatatctgaccccggatcgaggctatagcgaatgaggaaaatgagcggcccgagttcaatagcctgtttgccagagttgatagttccaaggatccgttggcgatgatttctattctccccgcgtagtcggtgaacttatcattgatcccatggagaacaaaacagatcaaatagtagccgggcagaaacgacgcagagatgaactgcagatgaccacactggcaacgcattgcttcaaggtggacgatattgcttgccagacttttcctgtttcatcctctgaaggtgaatgaacaataccctcaatcttgtatcgcattgttgatgttatgtagaagtaccaagcataaccatgccacaccaacaccagcaccaggaacgttttccttcacaagagggaattagctggaagagagatgatgaactcccacagccacagaatccaccaaaaaagaaacgttatagaggggtaaggcaaagaccgtggggaaaatgggccgcagagattcgtgatcctaagaaggcagctcgagtatggttg

SEQ ID NO: 482 - DNA, 1240 bp, Pinus radiata
attcccaggcctggttaaggagggcgggggttacatcagtgcaggtgggtttgatagaagcggcggagacggcttttgggagaggatattagctggccgctgtaaaaagttagtggtggttatggcttatgctgaaaatttgaggaattttggttttggggccaataatggtggttctaatcagagcaatagcagtaatgggggtgtagatggctattcttcgatgtccaatgagggagggcttgttatgggacagattggcggtccacatggctacccgaattcttcaccaagtgctcaagatgcgctatacgaggagctgtggcatgcctgtgctggacctcttgttacgctgcccaggatcggggagcgggtgttttatttcccacaaggtcatatggagcaggttgaagcatccacaaaccagggggctgatcagcacatgccattgtttaacctgccctataagatcctttgccgcgtaatcaatgttcaactgaaggctgaacctgatacagatgaagtgttttctcaaattaccttgctcccagaggcagagcaggatgagtcgtctgttgagaaggagcctctaaccccactgcctccaaagcctttagtatactctttctgtaagaccctcactgcatcagataccagtacccatggagggttttctgttctcaggagacatgctgatgaatgtcttccacctctggatatgagtcagcaacctccatctcaagatctggtggccaaggacttgcatggagttgaatggcggttccgacatatctttcgcggtcagccaaggaggcatttgcttaccactggctggagtgtctttgttagttctaaaagacttgtggcaggagatgcatttatctttttgaggggtgaaaatggtgaactgcgtgtgggagttaggcgtgccatgcgccagcaaaacaatgttccatcatctgttatatccagtcacagcatgcatcttggtgtcattgcaactgcatcacatgcagttacaacgaagaccatgtttagtgtctattataaaccaaggacaagcccatcagagttcataattccttatgatcaatatatggagtcaatgaaaatcaatttctcggttggaatgagattcaagatgaagtttgagggggaagaagtcccagagcaaagatttactggaaccattgttggaataagtgatgctgatcctgtgaactggccgaattcaaagtgg

SEQ ID NO: 483 - DNA, 516 bp, Pinus radiata
ttcagatctataaatcaatgtctgcattaatgacaaactaagttgaaattcccaaatgttggtggttactatttaggatcggacattaggcgttgtggtctcgggttcgattcacaaggcatttctgtttcggaatttcaaagcaacacgtatcagaaaactgattctatactgtgatgacgcaggctactaactacacagcaggtaccatcagagacgatcaagaggagcaatgtgtgaggaggggaccttggactgttgatgaggacatgagccttattcgatgcgtaaccacccggggtgaaggtcgatggaacacagtagccaaatttgcagggctaaagagaacaggaaagagctgcagattgagatggcttaattatcttcggcccgatgttaaacgtggaaacataacgccggaagagcagctattaatccttgaactccaccgtctctggggtaacagatggtccaagattgcacggcaactcccaggcaggactgacaacgaaatca

SEQ ID NO: 484 - DNA, 328 bp, Pinus radiata
ggggaatgattcctggccgaggccattcgagcgccatacacattgcggcggactgcgggaagtattgttttcagtaattcccttaattgggtcccagaatacgttctcagatccgaaaacggttcagtccatcggaggttacagcgattcgaaggcctgaaaaccctaaaaatacctatccccctttgtctttgaatggcggagaactatggcagcccggatagcagcccccggtcggagaacgaatccggcggcggtcacatgggcggcagcgatttctctgtgaaagagcaggatcggttcctgcctatagccaacgtggggcgca

SEQ ID NO: 485 - DNA, 919 bp, Pinus radiata
gtcatccatattttctttttcagtctgcaatacaaattgttattcgagatacgattgatcatgcttgaaggctatgcctatgcttgcggaaacataccgtgacagctttgagacgacttcgggaggtagcagcgtggatctggtaggaatggctctaccaggtttggcccctaatttgtcttctgcttcagtttcagcttcagcgtcggaagattctgccaagaaaataaggaaaccctataccatcaccaagtccagagagagctggtctgagcaagagcacgataaatttctcgaagcccttcaactatttgatcgtgattggaaaaagattgaagcttttgtaggatcaaagactgtcatacagattcggagtcatgcacaaaagtacttcttgaaggtccaaaagaatggcacaagagaacatgtaccacctcctcgtccaaaacgcaaagcatctcatccatacccacagaaggcctcaaaaaatgttcctgtgtcacagcaagtatcaactgcttttccaactgctgctactcaactagattctggatattatccaagggcagagtcgtcttccatactcaccaaatctggctcgtcatgcccaactgtttcttcctgggttcatcataccataccatcaatagatgcttcgtttgtggaaaaagatgatggtgggcctccaggcattgaaacagggaataattgcagtagtggtagcactgagagttctcctcctacgtggccaccctgttctgaaatccctgagaaagtcaaaccagatttttcacaagtttataagttcattggcagtgtctttgacccgagcacaactgatcacttgaagaagcttaaggaatggatccaattgatcttgaaactgtgttgtacccatgaggaacctttccacaacttg

SEQ ID NO: 486 - DNA, 359 bp, Pinus radiata
tctgtaagtgcttgagggcttcttgtatcgatgaggccattaacgatgggaagatcttttagttgttggagctgttcaaaagataatggccacgagcgtcttaatcgtggatcttggagtgctgaggaggatacaattttgagtgaacatatcaaaactcatggagttggtcgatggacatctcttcccaagaaagcaggtctaaaacgatctgggaagagttgcagattacgttggtttaactatcttcgttcagatatcaagcatggaaacatttctccggaagaagaggaactcctcatcagattacatcgtctccttggcaatcgttggtcgttgatagcaggacgacttccagg

SEQ ID NO: 487 - DNA, 438 bp, Pinus radiata
gtagggttttaaggaagaaagacgatccaagcagtgggtttttatcgagctcccacgcagtttgaagggtgtcgcagcagaagaagatcggattcgttcatcctcatcacaaagaatataccatgggggtcattacccatgtaaaagaaaagtaagagatggatcgggataagcttatgaagatggctggtgcagttcgtactggtggaaagggtacagtacgcagaaagaagaaagcagttcacagagccacaacaacagatgacaaaaggctccaaagtaccttgaagaggttaggagtgaatactattcctgctattgaagaagtaaatattttcaaggatgagatggtcattcattttataaacccaaaagttcaagcctctattaatgccaatacatgggtggtcagtggatctccccagacaaaaaatttac

SEQ ID NO: 488 - DNA, 478 bp, Pinus radiata
agaatttaggtagggttttaaggaagaaagacgatccaagcagtgggtttttatcgagctcccacgcagtttgaagggtgtcgcagcagaagaagatcggattcgttcatcctcatcacaaaagatggatcgggataagcttatgaagatggctggtgcagttcgtactggtggaaagggtacagtacgcagaaagaagaaagcagttcacagagccacaacaacagatgacaaaaggctccaaagtaccttgaagaggttaggagtgaatactattcctgctattgaagaagtaaatattttcaaggatgagatggtcattcattttataaacccaaaagttcaagcctctattaatgccaatacatgggtggtcagtggatctccccagacaaaaaatttacaagatctccttcccggaatcatcaatcagcttggacctgataatttgattaatttgaagaagattgcccaacag

SEQ ID NO: 489 - DNA, 608 bp, Pinus radiata
tgacgacgaagaagaagcttctctgaagggcaaggtgcggtggggactagattcgatagcggctctgggtttaaagttctgaattaaacgggctttggctaaaaagtaaaaaacggttggaatttgagcaggaggagctgatagagtgttattatcgggacggatgaaataattgaagccaaaggggcttatgtgtgtgttttgcggacttctgcgagtaaggggaaatggaattattggagtgaagtaggtgttcttggagaaatatgcgggcagctcataataacagcaataatagtgagaaatcttgcgtgttgagatctctctgagcttcgcttttcagaatgaggaccggcttctcccagcagcatcgggaaggggaaaagaggagtctcaattcagagctatggcatgcatgtgctgggccacttgtgtccctacctgctgttgggagccgtgttgtatattttcctcaaggtcacagtgagcaggtggctgcctcaacaaacaagaggttgatgctcacattcctaactatccaaatcttccaccacaattaatctgccactacacaatgttactctgcaggcagatgtggagacagatga

SEQ ID NO: 490 - DNA, 331 bp, Pinus radiata
ttgaattcttgtcttccccccagctgaggctctctgagaccaaggtgagattcagccagtagtaagctatagattgatagttcagagaaaagactgaaaggcaaaaactatatagacataacaacggagagagcagcacaggaaccaggttgcataatggctaggcctcaaagatacagaggagtccgtcagaggcactggggatcatgggtctctgaaatccgccatcccttattgaagaccagaatatggctaggaacatttgaaacagcagaggatgcagcacgagcatatgatgaagctgcaaggatgatgtgtgggccgagagcta

SEQ ID NO: 491 - DNA, 431 bp, Pinus radiata
ccgctatcctttccattacatcccacgttaggtcacggtttcgaacccttgcacggccattcttctgttaagatggtgagatctccctgctgcgacaaggttcataccaataacaaaggcgcctggaccaaagaagaagacgagcgtctcatagcacacattgaagcccacggcgagggctcatggcgttctcttcccaaggccgcagggctgctgcgatgtgggaagagctgcaggttgcgatggataaactacctgcgtcctgatctgaaacgcggaagcttttcagaagaagaagacgatctcatcatcaaactccactccctcctcggcaacaagtggtcgcttattgcagggagattgcagggcgaacggacaacgaaaataaaaaattactggaacacgcacatgaaaaggaaattgttgagcag

SEQ ID NO: 492 - DNA, 469 bp, Pinus radiata
gccagagctgtggctgttcccagaagaggatatcatcagctgtccagtttgtcctaagagactacagaagaagaatatagaagatgggtagatccccttgccccccaaaagaagcgcttaaccgtggggcttggacaggcatggaggatacgattctcaccgagtacattcgagttcatggcagtggtggctggaaagatatctccaaaagagcaggtcttaagaggtgtgcaaagagttgcagattgcgttggctgaactatcttcgtcccgatattaaacgtggtaacatttctcccgaggaagaagagctcattattcggttgcatcgccttcttggaaatcggtggtctctgatagcaggacgactgcctggtcgaacagacaacgaaatcaagaattactggaacactcatatgagcaagaagccatggctgtcaatggacgaatctcagtccaatacttcgca

SEQ ID NO: 493 - DNA, 380 bp, Pinus radiata
gaggaggaggacgaggaggaggctgggaaggagctggaggcgtgggagagagcatacgctgacgaaaggtcatgggaaaccttgcaggaggacgaggagggtcttctcaactttgacaagaaacagcagcaacagcaacagcgccaatacagacgccgtctgcagtctgctgcagccgcggcttcaaacattcagcgaggattgatccgttatctctacatcatcatcgacttctctcgggcggcagcagagaaggatttcaaaccaaatcgaatggtggtggttgcaaattgtgtcgaggcatttgtgagagaattctttgatcagaatccactaagtcagctgggtattgttattataaaaaatggcgttgcacatcg

SEQ ID NO: 494 - DNA, 420 bp, Pinus radiata
gtcgagctccttgctgcgagaaaacccatacaaacaaaggcgcctggagtaaagatgaagatgaagcactcgttgcatatattcaagcccatggagaaggcagttggcgttcccttcccaaggccgctgggttgcagcggtgtggcaaaagctgcaggcttagatggataaattatctccgtcctgacctcaaacggggcaatttcagcccagaagaagatgagatcattatcaaacttcattctatgttgggtaacaagtggtctttgatcgcaagcaaattgccagggcgaacagataatgagataaagaattactggaacactcacattaagagaaaaatgttagaaaggggtctagatccttctacccatctccctttaatgtcagaccatggctcttttgagtcctccagcaaga

SEQ ID NO: 495 - DNA, 568 bp, Pinus radiata
aaaagttgttcctccactggatttcactcagcagccacctgcccaggagctgactgccagggatcttcatgacaatgaatggaaatttcggcatatttttcggggtcagcctaagaggcatctgctcacaacaggatggagtgtttttgtcagtgcgaagagacttgcagctggtgattctgtgctctttatttggaatgagaaaggacaactgttgttgggaattagacgagcaaacaggccacaggctgtaatgccctcattggtactctcgagtgatagcatgcatatagggctccttgctgcggctgctcatgctgctgctacaaatagtcgatttactattttctataatccaagggcaagtccatctgaatttgtcatacctctggcaaagtatgttaaagcagtttatcatactcgtgtttctataggaatgcgttttagaatgctatttgagacagaagagtcgagtgttcgcagatatatgggcaccataactggcataagtgacttggatcaggttcgatggccaaattcacattggcgttctgttaaggttggttgg

SEQ ID NO: 496 - DNA, 396 bp, Pinus radiata
tgggagtttgctaatgattgtttccggaaaggagaaaagcagctgctctgcgaaattcatagaagaaaaagcgtccagcaatcttcagcagcccctgctagcagatgcgtttcgccggtcaattctgtggaagagcaggcattgtcttcgacctcctcccctgtttcttctcacgcagaggcggcgttagttaattgtggtcaaaatagcacatccgggctccatggtgaaaatgaaaaactcagaaaagataatttgcttctcatgtcagagctggcacaaatgaagaaacagtgcaacgatctcctcctgtttctgtcaaagtgtgtaaacattaccccggacaacctcagcaatatcctgatagccgcttctcaaacgaattgccgcgatgaa

SEQ ID NO: 497 - DNA, 643 bp, Pinus radiata
cggcaagtggggagtgccggacaatttgtatggagctcaggaagacagtggtggaagtagtgttaaacagaagaacttgaaggatggggaccaattcaccagtagtgatgaagctgacagtgaggtcaatgaattcaacattatgaaaagaagcaattcaggggttggatatgaagataacaaaagaagtggggggcaaggtgatggcaatcagtacaggtcacgtcactctcggagcatctccatggatagcattatgagtaagatgcataacttcagtgaagacttggaacaggaaccgtctcaaggtcggaatgtcagacactcccatagcaattcgatggatggaagtacaaatttcaatgtggaattcgggaatggggaattcagtgcatctgagatgaagaagatcatggccagtgagaaactggcagagcttgcaacggtggatccaaaacgtgtcaaaaggatattggctaatcgccagtcggctgcacgctccaaggaaagaaagatgcgctatatctcagagctggaacgcaaagtccagaccttgcaaactgaggcaacaactttgtccgcacagctgactcttttgcagagggatcaactggactgggcagtcagaaccacgagctcaagt

SEQ ID NO: 498 - DNA, 328 bp, Pinus radiata
aaaatctgtacctagagcccagcaatatccttcgcaatggctgacggccaccagttcaacaatattttgcttgtaggtcgaggcggcacgaatccgggtcaactgaggatacattctggaggtatagtgtggagaaggcagggtggaggcaaggtggttgatgtggcgaaaaacgaagtcaagagtttgagttggactcgagttcccaggggttatcaactcggtgtcaagcttaaagctgggttgaacatcaagcttgcgggatttcgtgaacaggatgtcggcaatttgacaaatttcatgacaaacacaataggattagctccca

SEQ ID NO: 499 - DNA, 372 bp, Pinus radiata
gttgtattgtattgcaagtgaggaaatttaggaggtgtggcgtaaaatgggagaccacagtggtggagagagcagtcctcattctgacatagagtctaccggcatccacaataatggatcttcttcttcctcacaatccatcatacgagagcaagaccggctgcttcccatagccaatgtggggcgcatcatgaagaaaaccctcccaaccaacgccaagatctccaaggaagccaaggaaatcatgcaagaatgcgtctccgagttcattagctttgttactggagaagcatccgacaagtgtcacaaggaaaagcgcaagaccatcaacggcgatgacatactatgggccatgaccactctcggattcga

SEQ ID NO: 500 - DNA, 344 bp, Pinus radiata
ccgcaacattcaacgtaatgaatatcataatcttttcaacttcatcagttccaagggattgaaaataatgaacttaggagatgcacatggcaccagtggagttgctgccgttctcgagaattcggatgatgaagctgtggatccacatcttgaacgtatcaaaagtgcacgtgaaggcggtgctggagaagatagtgatgaagaggcatgctacactggggacttatctctgatatgtgctgtagtcaaagaactaatatgcacacatgattaacaagagttaaatcaagagactgatgtctgtttctgttttgtttgtgtgcaggatgaggattttgttgcag

SEQ ID NO: 501 - DNA, 462 bp, Pinus radiata
gggaggcagagaaggaacggaaaaaggagtgaatttttgtgggtttgtgtttattgggaagatggggtgtgtgtcgtccaaggtggagaatgaagaattagtgaaaagatgcagggacaggaggaggctaatgaagcaggcagtgaattccaggcacaattttgctgcagcccacattgcttatttgagggctctgcaaaacacagggaatgctctggtacaatttgcggagggggaatccagtgctatgaatggcaatgctattgaagaagcggccacaccaatgccagcgaccccattaacagcatctcatcgccatcccatgaaattccatcctcctcctccgcctccgccgccgccattggtgcctagcagcccctccgtgagtcccagcatggagagctttcgtatgccatccaaacacaatcccctcagtaggtctacttcagacattagctatgt

SEQ ID NO: 502 - DNA, 504 bp, Pinus radiata
tatgtctctgcatttcagccagtccatggtttcaagttagttagtccaataaagcagagatgggtcgtgctccatgctgcacaaaagttggtctcaacaagggagcatggtctgccgaagaggatagtcttctgggaagatatattcaaactcatggtgaaggcaattggaggtctctgcccaagaaagcagggctgcgaagatgtggaaagagctgcagattgcgttggctaaactatcttcggccatgtatcaagcggggaaatattacaacagatgaagaagaacttattatcagaatgcatgctctcttgggcaaccgatggtcgataatagcagggagagtccccggccgaacagacaacgaaataaagaactactggaacactaacttgagcaagaaacttgctgtcaggggaatcgatcccaagactcataaaaaaatcacgacggacggcacgaacagagtcaacggtgatcgtttcagccagaggaaaggtgaga

SEQ ID NO: 503 - DNA, 416 bp, Pinus radiata
acggcaactcattcgtgaactagaacagatgtttaacattgaaggagaacttgaggatccaagcaaaggttggcaggttgtatacactgacaatgaaggggatatgatgcttgttggagatgatccatggcaagagttctgtagcattgtgcggaaaatttacatttatacgcgtgaagaggttgaaaaaatgaccccacaaaccccaagtgcgaactcaagggatgttcagaagagcctgtcacaagaggaaacttcccggagttctgatcgtcaagattcatcaattgcgggggtcaccgctgaaaggagttctgatgcctgataccatttcaatctgcatgttggtcacttctgtcgggcctgctaaaggggcatcaaagggcatgttttagttggccgtttgatgccttggg

SEQ ID NO: 504 - DNA, 1206 bp, Pinus radiata
gccgaaactcgaatcgatatgctttgtggccggttcaaatatttgagctggcttagcttctctggttcagaaatggcggactaaagtaatagtgtgccccgaggtctggtgttcgaatctcgttggcgtgaaaggtcaaatttttctctcgagtttcattgattctgaaaaactggcatagctatggcgatgagcaatgggagattgtgtgaagatttggataggattaaggggccgtggagccccgaggaggacgcgtcgctgcagaggcttgttcagaaatacgggccgaggaactggaccctgataagtaaaggaatcccggggcgatccgggaaatcgtgcaggctacggtggtgcaatcagctgagccctcaggtggagcacagaccttttaccccgtccgaggatgctgctattctgcaggcccacgcgcagcacggcaacaaatgggcaacaattgcccgagccctccccggccgcaccgacaacgcgatcaagaaccactggaactccacgctacggaggcgctgccgggaccccaaaaagggcatcgttgtccacctggacgacgaaatcagcagcttagacgccgctcgcaagcggagcagcgacggcttctcccacgatggcagcagtgcgctggaggacaacggatgtagcagctgggaagtggactccaagcggctgaagagactaggagaactgggaacagagcagggccccgaggttgaagccgaggtcgaggtttcggaccggagcgacgccaacccgggacgcgtgctgtacaggcccgtgccggtcgtgtcttttttcagttcattcgggaaaaccgttgcgaatctacaggaaacggcggccggcgcagtcggtgtcgatccgccgacctcgctgagcctgtcgctgcccggactcgatcccgcgatcccctctccgaagctgtccactcaaaaggactctcacaacaatagcacagttaataacaatattcctattccgccggtggtgaatacatgagagcagacgaggcggtggtggagcgactcagcaccgccgtcaaggccacggtggcaagcatgctaacgcctgttctgaactcgtcgccacgtggctacaacccaccggctgtgagcagcgaccttctggcgctgatgcgggatatggttgcgaaagaagtgcagaaatatatgtccagtcatcaccagc

SEQ ID NO: 505 - DNA, 386 bp, Pinus radiata
gagaatttggtcgttcatctgaaaaaggacgaggatatggaaggggccgtggccgtggtggtcgtggaggatatggtaatgatgctggtgatgaaagtcagaggcctcggaggcagtatgaacgtcggagtggtactggacgaggctacgaggttaagagagaaggggctggtcaaggaaattggggtactcctacagatcagggattcacagaggaacctgaagagctgagtcgtgcagaggaagagaagactgtgacccctgagaaacaggaagaacagaaacccagtgaagagtccaatcaagaaatccctgcaccagagtctgaagagaagaaagaggaggaagaagacaaggatatgactcttgatgagtatgagaaagtg

SEQ ID NO: 506 - DNA, 408 bp, Pinus radiata
ggcagtgaatagcagtctctctgttggaatgaggttcaagatgcgttttgaaggagaagagtctcctgaacggaggtttactggtacaattattggcatgggtgaggttgataatgtgagatggccagaatcaaagtggagatcacttaaggtccagtgggatgaaacatcagtggtcccgcgaccagagagggtttcaccatgggaaattgagacgtttgtagcttcatctgcagcacttaatcctttgccagcaccaaggactaagaagcctcggcccaatttggtgtcctcatctcaggaattaatgatacatggatcgggcaaaacagcaacagattcttcacaggtacacagattgccaagggtcttgcaaggtcaagaaatgaggacctttggaggatcctt

SEQ ID NO: 507 - DNA, 320 bp, Pinus radiata
gcaaagagttgcagattgcgttggctgaactatcttcgtcccgatattaaacgtggtaacatttctcccgaggaagaagagctcattattcggttgcatcgccttcttggaaatcggtatgtagagaatcgggggacatgatttattcatgcgccagaatttcacgattcctcatcgaattagtcatgcaatgtttgtgcaggtggtctctgatagcaggacgactgcctggtcgaacagacaacgaaatcaagaattactggaacactcatatgagcaagaagccatggctgtcaatggacgaatctcagtccaatact

SEQ ID NO: 508 - DNA, 395 bp, Pinus radiata
ccggtccgggcggtggagagcatcagccttggagttacagaccaggaaaatacaagatgggtagatctccttgctgctccaaagaggggctcaaccgcggggcctggaccaaaagggaggatatgattctctccgaatacgttcgaattcatggcgatggtggatggagaaatcttccggaaaaagcaggtcttaagagatgtggaaagagttgcagactacgctggttgaactatcttcgtcccgatattaaacgcggaaacatttgccccgccgaggaggagcttattattcggctgcatcgccttcttggcaatcggtggtcactgatagcaggacgactgcctggtcgaacagacaacgaaatcaagaactactggaacactcatctgagc

SEQ ID NO: 509 - DNA, 658 bp, Pinus radiata
gccatatctacatgaatctcgacatcttcatgcgatgaagagagcgagagggtgtggtggtcgctttctgaacaccaaaaagttagaggactcgaaagcaaatgtggataatggaaagacaccagaaggacatactgcgcaggctgggagttcttcaggttctgaagttctgcaatctgaaaatggaaatggaaattctacccaggagctacatggtgcttgtgggatgtcaggctcacaagttactagcattgcacagtcatctgaaaatggtacaacttatcaatattctcatactaatggagcatatcttaaccactatcaacatccacatttccatatatcagcttttcacccgctctcaagtggaggcgaggaaggcagcagtgcaaaaggtgggagcataatatctggtggatcacaacaacgagttgttgtgatccagtgaagtgtgaaataagatgttagtggtgagaatctcacgtgcttggttctccgtgtcacattgactataaagataggtctcaatgagtgcgaagatcataaaatgaaacagattttataaagtcttcgcaattttatggttcagaggccattatcagtaaaacaggcaacccgtgatggtttgtttttgaatgggttgcagtttgcacaaaca

SEQ ID NO: 510 - DNA, 351 bp, Pinus radiata
cacgagggccagagctgtggctgttcccagaagaggatatcatcagctgtccagtttgtcctaagagactacagaagaagaatatagaagatgggtagatccccttgccccccaaaagaagcgcttaaccgtggggcttggacaggcatggaggatacgattctcaccgagtacattcgagttcatggcagtggtggctggaaagctatctccaaaagagcaggtgagtgtcaataaaaatttaatagcaattctttttattagcagaaggaagtagcaatctcccaggttatatataacaattcatcagtcatatatatcagaaatttatagtcgagtctaagagggaga

SEQ ID NO: 511 - DNA, 754 bp, Pinus radiata
gttacacggcctgggaaattccgtagttgtcaagatggttatgctgtgagggcttccctcaaggctgaagatggagtgttatatcctcttgaaaaaagctttttcttcttgcctaaacccccgacacttattcttcacgaggagattgaatatcttgagtttgagagacatggagctgctggtacgagtagtatgtcttcacactattttgatcttattataaagctgaagagtgagcaagagcatcagttccgaaatattcagaggaatgaatatcacaatcttttcagcttcataaacaccaagggtttaaaaatcatcaatttaggagctacagaaactattggtggagttgcagcggctcttcagaattctgacgatgaagctgtagatccacatcttgagcgaataaaaatctacgtgatggtggagctggtgctgaagacagcgacgaagaggatgaagactttgttgcagaaaacgatgatgctggatctccaacagatgagtcagaagaagagggatcagatgcaagtgagagtgcagaggtcaagcaacctgcaaagaaagaagtaaagaaaaaaaaggcggtggctcccaaggcaaccgagaccaagaagaagaagaagggatgacgaggaagagggaggaaagaaaaagcagcggcgaaagaagaaggatccaaatgcgccaaagaaagccatgacttggttttgtccttttctcaagtgaaagagagatctgaaaaagagtg

SEQ ID NO: 512 - DNA, 424 bp, Pinus radiata
cttcctggtgttgttgctgtgatttctctgccattctgtgttgggtttatggttttagcttcactacaagcctttagcaagcctcacaaataagctttgcagtaggatgtctcctcccccgtcatattccatgtttcccaattcaggaatgggcttaaatccctcagtgacatcttcagaaccctctagtcaggtctccggatcgatcccccatcaatattcaggctccgaggaagaccctaaactgacgatcgatgaaagaaagcagaagagaatgctttctaacagagaatctgcaaggaggtccaggatgagaaagcaacagcatttggatgaattgagagcccgaacagctcatctcagagcagagaacagtcatatgctaacaaaattcaacattgcttcacagaaatacatgcagctg

SEQ ID NO: 513 - DNA, 487 bp, Pinus radiata
cgaggtcagccgagaaggcacttgttaacaacaggctggagtgtctttgttagcgcaaaaagactagttgcaggcgatgcatttatttttctgaggggtgaaaattcagaattgcgggtgggggtgaggcgagttatgagacagcaaagtaatatgccatcatcagtcatatctagtcacagcatgcatttaggtgtcattgctactgcatctcatgcagttacaactcggaccatgtttactgtttattataaaccaaggacaagccaatcagagttcattattccttatgataaatatatggaggctgtgaatagcaacctttcagttggaatgaggtttaagatgaggttcgagggtgaggaggccccagaaaggaggtttactggaactataattggaataggtgacgttgatccttccagatggccatcttcaaagtggagatctctgaaggtgcaatgggatgaaacctgtgcaattccac

SEQ ID NO: 514 - DNA, 648 bp, Pinus radiata
gttttcccgaaatatgggacgttcaaggtttccaacaaactgctatgttctctcagccctttctctttttcctgcggctcgagcgtgaggtcgatgtattcattcctgttaaattttcttttgttctcttttccattttcgatgcctctgtcgagttcttttttctgagatttttgcagtcttcgaaggtttgagtttggcctcagccttggaagtatctcttttggtcttaggtaatggaattgtaaccttcccgaacaacggcggtagtggtctggagattcgcatgtacgaagataaaatggcgcaatctgaggaacagcctaatgaagccacggttcctcgccctgctgattctcatagatctataccaacgccgtttctcatgaaaacctaccggcttgtcgacgatccgagcttgaacgacattatttcatggaacgaagacggcactacgttcatcgtttggcggcctgcggaattcgcccgtgatttgctgccgaattactttaaacacaacaatttctccagttttgtccggcagctgaatacatacggatttcgaaagattgtgccagacagatgggagttcgccaacgagttttttcgcagaggagaaaagaaattgctctgcgagattcatagaag

SEQ ID NO: 515 - DNA, 315 bp, Pinus radiata
tgcatttcagccagtccatggtttcaaggtcgaatctccttgctgacatgaatccatcaatatatatagagagagagaaatatacgtttttcagatttaagcatggccgtttaataatctgcattgcatggcgagattgtatttgtgttagaagttgattttctgttttttctctttcagttagttagtccaataaagcagagatgggtcgtgctccatgctgcacaaaagttggtctcaacaagggagcatggtctgccgaagaggatagtcttctgggaagatatattcaaactcatggtgaaggcaattgga

SEQ ID NO: 516 - DNA, 563 bp, Pinus radiata
gacacgtagtggatcaaagaattcggcacgagctcctgtctctgggttctctatgaattctaacatgggtgtgtctggaggtctagatgaaagtgggttttcacagcctccaccaaattttgcaaagatgaatgctcccacgagaacattcactaaggtttacaagctaggttctgttgggaggtcagtggatgtaacacgtttcaggggctatccagatctgcgtgccgagcttgaccgtatgtttggtctagaaggccagctggagaacccaagatcaagctggcagcttgtatttgttgacaaggagaaggatgttcttctccttggggatgatccttgggaggagtttgtcaataatgttcgatttattaagatactctctcctccagaagtgcagcagatgagtcaggaagatatggagttttggagttccattccaactcagcagcagacaagcagtagttcagacgactgtgtagctagaaattcttctcgcaacatcagatcagttctcacatcgcctggctccctggacgtattaagtgtagatccaattgtac

SEQ ID NO: 517 - DNA, 392 bp, Pinus radiata
ttcatgacaatgagtggaaatttcggcatatttatcggggtcagcccaagcggcatctgctgacaacaggatggagtgtatttgttagtgcaaagagactcagtgctggtgatgctgtgctttttattaggaatgagaaaggacagttattgctgggaatcaggcgagcaaaccgatcccaaacggttatgccatcatcagtgctgtccagtgatagcatgcacataggtgttcttgcggctgcagctcatgctgcttcaacaaactgccgcttcactattttctacaatccaagggcaagtccatcagaatttgtcataccattgtctaagtatgaaaaggcagtttatcacacacgagtttcaattggaatgcgcttccggatgctgttt

SEQ ID NO: 518 - DNA, 319 bp, Pinus radiata
tttaagcatttcattgagtcttaggtcacggtttccaatcctggcaggtctcattattctgtctctctggcaagatggggagaactccctgctgtgaaaaaggtcatacaaacaaaggcgcgtggaccaaagaagaggacgatcgcctcatcgctcacattcgagcccacggcgaaggccgctggcgttcgcttcccaaggccgcagggctgatgcgatgcgggaagagttgcaggctccgatggataaactacttgcgtccacatctcaagcgtggaaacttctcagaagaagaagatgagttcatcatcaaactcca

SEQ ID NO: 519 - DNA, 513 bp, Pinus radiata
accgtcgagagagcttcatatctaaccaatacataacacctgtatggcttcatagcttcacagcaacagggcaccatgggccgagctccttgctgggataaaatgggagtaaagaaaggcgcctggactctagacgaagataaaatactcgtcgattacattaccaaacatggccatggcaactggcgcgcactgcccaagcaagcagggctcctgcgatgtggaaagagttgtcgcctgcggtggacgaactacctgaaacccgacatcaaaagagggaattttagtccagaagaggaagatcaaattattaaattgcatgagctcatagggaatagatggtccactattgcttcgtacttgccaggaagaaccgacaatgagatcaagaacgtgtggaacacccatttaaagaaacgtctcgcgcgtatgaaagccgactcggttgcagtcgacgcacagccaacgcctgcgtcttccctggcctcatccactacagaaatgacgtgccac

SEQ ID NO: 520 - DNA, 219 bp, Pinus radiata
gtgcattgaagccaatggcggaggggctcctggacgctcgcttcccaaggccgcagggctgcagcgatgcgggaagagctgcaggctgcgatggataaattacctgcgtcccgatgatgtcaagcgtggaaatttcacagaagaagaagacgatcttataatcaaactgcactcactcctcggcaacaagtggtctctaattgcagggagattgccagg

SEQ ID NO: 521 - DNA, 392 bp, Pinus radiata
cttagcgacggttcccaatccctagtccctgcactttactcgtctctctgtgaagatgaggagattgcgctgtgagaagggtaatacaaacaaaggggcgtggacccaacaagaagatgcccgactcatcgcctacattcgagcccacggcgaaggcggctggcattcccttcccagggccgcaggtctgctgcgatgtgggaagagttgcaggctgcgatggataaattacctgcgtcctaatctgaagcgtggaaacttctctgaagaagaggacgatctcataatcaaactccacaacctcttgggcgataagtggtctcttatcgcgggtcgattgccgggccggatggaagaccagataaagaactattgggatacccactttaaga

SEQ ID NO: 522 - DNA, 447 bp, Pinus radiata
aggaaaggaggttcatattgctgagcctgaccaggtttcagatccaccaaaggcaatcaaatatgagccacctgcagtaagctgtgatcaggagaaacctttgcaaaagttatcaaaagaaactcaagtcaaacagcacggcaaccccaccaggagctgtactaaggtgcataagcaggggatagctcttggaagggccgttgaccttactaagtttgaaggttacgaggaattaatttgtgagcttgaacgcatgttcaacattgaaggagaactacggaatcctagcaaaggttggcaggttgtgtacacggataatgaaggagatatgatgcttgttggtgatgatccatggcaggagttctgtagcattgtgcgtaagattttcatctatacacgagaagaggttgagaaaatgactcctcaaaagcatgccaaactgcaagg

SEQ ID NO: 523 - DNA, 822 bp, Pinus radiata
tggaaacccaaagctccgataacaactacatggtcggctttgtcctggccaatgtcgtgggattgcagtactacacgggtaccatcaatggccgtgaaatgattcgactagttcgcgagcctgaaaatcggtacgaccccaacgccatcaaagttctcaacatgagcggccagcaggtcggtcacatcgagcgcgctgtggcgctggcactggcgtcccatgttgatcaatccctaattttaatcgaaggaatcgtgtccagggctctgcataaaggtgcttacaagttaccttgtcaaatctacattttcagtcacagggattcgatgggcatggtccttcagttgcttaaaggggccggattgaatgttattactgcggaggaccaagagtttttaacggcggaatccattgctgcaaaagaaatatatgaagatccaggggtgaaggaggttagaagggtcgatgatatctttgggtctcttaataatcccaagaagaggcagtcgatggaggcttgcgagcttgtaacttcgacactcttacagcaccagaaggaggcattggcttggatggtgcagagggagaattcttccgaacttccgccattttgggatgtttgtgacaagacgagtaagtcacagcagctcagatataaaaatgttttgacaaattttgagacgaatggaaggccgaagcctttgagaggtggaattttggcggatgatatggggcttggtaagacgctgtcattgctttcgctcattgcaacgaaccgtcccggtgccaagctccctcctgttgtagatattgctccctctt

SEQ ID NO: 524 - DNA, 390 bp, Pinus radiata
cttaattccgcaacacaatgcgttttcattggagttgagattttcagatcggcaattgccaagctcaacgcccccaaattgtgattcgatgtttccctcccactacacagcgttggcattgcgtcgccaaatgtggagaaaccccagagagtccggacagagccattcccagcctccagagaaagatagaggaaaaactttcggccaatttaagggaatccgaatgcgaaaatggggaaagtgggtgtccgaaattcggatgccgagatcgaaggagaggatctggctaggatcctataaaactgtcgagcaagccgcccgtgcttacgatgccgcactctattgcctcagaggaccaaacgccaaattcaatttccccaattccgtgcc

SEQ ID NO: 525 - DNA, 299 bp, Pinus radiata
cgagcaacagcgaagccgatttccaaagatggatagggagaaactcatgaagatggctggtgcagtccgcactggcggaaagggtacaatgcgaaggaaaaagaagacaattcataagactgccacggcagatgacaagagacttcaaagtaccttgaaaagaataggcgtgaataacatccctgctattgaagaagtcaatatttttaaggatgaccatgttattcattttgctaacccaaaggtccaggcttctattgctgccaacacatgggtgggtagtgggcatcgcaaacaaa

SEQ ID NO: 526 - DNA, 101 bp, Pinus radiata
gggaaagacccagatgaagttgaagcgagaacgcgaccagcaggcaagggacgcttcaaagcgccgcaacgggctgctgaagaaagcttacgagctctcgg

SEQ ID NO: 527 - DNA, 361 bp, Pinus radiata
atcgcttcggcccgagcaattttgcttctctgctaaacgatgggaagagcgccttgctgtgccaacggtgacagaagcaagggagcctggaccaaggaagaggatgacaggcttacccaatatattcaggctcatggagaaggatgctggcgttctctccccaaggccgcaggtctgcttcggtgtggaaaaagttgcaggctgagatggataaattatcttcgccctgatctgaaacgaggaggtttttctgaagatgaagacgatcttattctcaaactgcacgccctcctcggaaataagtggtctctgatagcgggtcgtttgcctggtcgaactggccaccaaaatcaaaactact

SEQ ID NO: 528 - DNA, 337 bp, Pinus radiata
cgtaagagcaatgttcattcattttgcaaaactcttactgcttctgatactagcactcatggaggattttctgttttacgaaggcatgctgatgaatgtcttccacctctggacatgagtcagcaacctccttcgcaagagctggtagccagagatttgcatggaatggaatggcgattccgccatatatttagaggccaaccacggaggcatttgctaaccactgggtggagtgtttttgtcagctcaaagagactggtagcaggagatgctttcatattcttgaggggtgaaagtggagaactgcgtgttggagtgaggcgtgctatgcgtcaga

SEQ ID NO: 529 - DNA, 491 bp, Pinus radiata
agcactccgagaagcaattaaaaatggtgcttgtccaaactgcggagggtctacatcgctgggagagatgcctggattcgacgaacaccatttccgtatagagaatacgcgcttaaaggaggagcttgatcgagtgtctggcattgccacaaaatatataggaagatcaatgccgcatttggcacccatagcaacaccacctatgctcatgtcctctcttgaactcgcaatggggagcttcggtgggaagcagtcacagcctgccgcgccctcggtcgattttatttcaggtccactggctgacgggcctataattaattgtggaaccttgacggatttagataaaccgttggcactggaacttgcaatgaacggtgtggaggagttgatccggatggcacaaactgatgagcctctctggttgaaggatgttaatgcgggcagcgtgaaagagctttttgaacttggatgagtatggcagatcgtttcct

SEQ ID NO: 530 - DNA, 350 bp, Pinus radiata
ggtttctttatatttatgtgcagattgcctggacggacacttgccaatggacgtctcatatggctgtgccaggccaacgaagcggacagcaaagtcttcccacgtgctcttcttgctaagagcgcctctattcagactgttgtatgcatccctctcgcggacggtgtcttggagtttggaactactgaagtggagcgagaagaccctggtctagtccaacgcaccataagcttttttttggagtaccccaaaccgatatgttcagagcaatctacatccagcccacagtgctcagacagagacgaaaaggatcaagtgggcatggtcacaataatgtcctccgacagcat

SEQ ID NO: 531 - DNA, 437 bp, Pinus radiata
ttcctgttcgattcactggatgccgtgaacatcaacatggaggccgtgcacaagatcgagaagttcctgctagctccgaagatcgacgccaccatttcctccgccgccgctccgccatggaagaccctgttcgccgccgccggcttctccccagtggccttcagcaacttcaccgagacgcaggcagagtacctgatccagcgcctccatagccgcgggttcgaagtcgagaaagcgcacgcggctctcctcctcgggtggcagggccgcccactggtctccgccactgcctggaggtgcgggcccccgccttaattaattaaattatcaaaaaccaatttagcagactaataacagaaataaacaaaatctctgtttttccttttttcttgttaattttcccgggtattttctgttaaacctgagctttgaaaaac

SEQ ID NO: 532 - DNA, 508 bp, Pinus radiata
gaagaaaaacaactttccataagtggacggaactggggagaagtgaatctagaaggaaacatgctcacatttttggttggttcgaaaccagcttttgaggtatccttggcagatgtatctcaaacacagctccaaggaaagaatgacgttgtcctagaattccatgtggatgatacaactggagccaatgagaaagattctctgatggaactgagcttccacattccaaactccaatacaacatttgctggggatgaggcgagccctccagcacagatttttcgagagaaaatcatgtcaatggcagatgtggggtcatcgggtggagaagcagttgcattgtttgaggacattgctatccttactccaagaggtcgttacactattgagctccatctatctttcatgcggcttcaagggcaggccagtgattttaaaattcaatacagcagtgttcttcgcctttttgttcttccaaagtcacctcacacacttgtggtgatcaccc

SEQ ID NO: 533 - DNA, 374 bp, Pinus radiata
tctaggtcattcacagaattttagtactgatgtcaataggatgccggatgttccaccccggagaggaggccatcgcagggctcagtcggaaattgcgtttcgcttgccggacgatatcatgtttgatggtgatcttggttttgctggttttgacatgcccacggtctctgatgacgcaactgaggccgaagatctgatttccatgtacatggatatggagaaattaacttcttttggagagccgttgaattctgcggcgggagaaggatcgaagctcccctcgggtgctgagactaatcgacctccgcatcattcaagaagtctttctgtcgatgctgtattttctggattcgaaggtaacatggaagatacga

SEQ ID NO: 534 - DNA, 487 bp, Pinus radiata
acgatcttcaccctcggtgcgctctctgcttatcccgattcccagccaactgctattatattcggagtactgtacttccagaactggtatcttcaagcaccaagaccattttctgagctgttaaagatactatgagtgatatggatcgttcatcatcagaagattcagtggattctcaaggtgatgtgaatgcaaactacaagatggttttctcggaagatgaaaaggatctcataagcaggctgtacaatctactgggccagaggtgggctttgattgctgggcgaattcccggcagaactgcagaggaaatagagaaatattgtagcaggcgatatattagtgagtactaggtcacatgggtttctaatagtcaatgaagaagaagggtagaagcagccttgcctatctaactgatttaagtttgggatatatatatcgactttgagtgatggccatatcttctggggtttataaggaagtatgt

SEQ ID NO: 535 - DNA, 372 bp, Pinus radiata
tttgtttgtgaggtggagagatcagaattctgcgaggtttttttgtcaatcaaaaaacagatggacagggatcatcatttgcagcatcatcgagtcgtaattcaagcttttcaaatggatatgataacccacagaacacgaataagaattcttcttcggggggaactggtgatgccggaagctttgaatgcaacatctgccttgaacttgctcaggacccaattgtgacactctgtggtcacctgttctgctggccttgcctgtacaaatggcttcacggtcattcgaagtctcaagagtgccctgtatgtaaggctttggtggaagaggacaaaattgttcccttgtatgggcgtgggaaggtgggttctc

SEQ ID NO: 536 - DNA, 836 bp, Pinus radiata
gtttgttcgaacgatgaaaaccagctaaaacaaagcgcagggattggcaggattcgagcagtggtccttggggcggagttgatagaagaagaagaaacctaccatatacacatacatatattatatacatagacacatgggggctccgaagcagaaatggacttccgaagaggagggagctctcaaagcaggtgttgagaagtatggcactggcaagtggcggaccattcagaaggaccctgagtttggacactgcctcgccgctcgttccaatgtggatttgaaggataagtggcgcaatatgagtgtgagtgctagtggccaaggttcaagggataaggtaaagactccaagagtaaaagctattgcctctctgccttattcatcagttactgctgaatctacttctgtattctcaatagaagcaacaacctcaacaactccagataatcttatttcccctaaaagttcatcaaatgggaaaattcactcaccaaggtacgatggtatgattttagaagcccttacaagtatgcaagatccaaatgggatagacattgccacaattgcaagtttcatggaggagcgacatgaattgccccccaatttcaagagggcgcttggcacaaagctaaggcggttggttgcacaggaaaaggttataaagattcgcaatagttacaagctcaaagatatgacatctacagaagtgacatctgaagtcttgggatctgcaattccaattgataattcaatgcaatactctaatgcattcaccaatacaattgataccttttcagtagatagagtaaatgaagcttcaatggctgctgcca

SEQ ID NO: 537 - DNA, 478 bp, Pinus radiata
atcacagtcggcctctgatcaaagaagaagccgaatcaggtgataattctgcaaattctgcagatgtagaaactcttcttcctcaggttgatgaaacagcttctgctgatctgacagtgttcccaggttttgttaccccttatgtaccatacgggttccccatatggcacacttttagacccacaataactcaaacttccaatgtttataagccaacagctgtaatgccaactgctccaataaaaatggacgaatgcacagggttatcccagttaagcctcggcggtgttgcagcggcttctgcaatgaaaccctcagaactgtcactcaaattacatggaagacccccctctagacaatcagcttttcaggccaaaccatctctcaatgaaagcagtagtttgagttccagcagcaatgtcatcagtgtagtctgaattgcaaggaaaagcaggtgtgaagaagatgatggtatgga

SEQ ID NO: 538 - DNA, 565 bp, Pinus radiata
cacatccatacatgtggggtggacagccgttgatgccaccttatgggactccactaccatatcctgcaatgtatccacatggaggaatctatgcacatccttccatgcctccgggtgcacttccgtatggtcactatggaatgccatcacctggcaatgctgaagttacaacgactttagcacttccaaatgctgaagcagaagccaagtcctcggaaggcaaagagcggaatacaatgaagagatcaaaaggaagtttaggaagccttggaatgattactggcaaaggaggagaaggtggcaaggcaacatcgggatctgcaaatgaggccatgtcacaaagtggggacagtggcagtgacggttcaagcgaaggaagcgaggaatataacactcaaactgagtcacaagtggcgagaaagagaagttttgatcaaatgatagtagatggagccaatgctcagagtaccaatattcaatcatataattcccaggctggagaaccctatgtgacttccggcgggcatgcaatgggtaatcccattagtcaagctgttgctgcagt

SEQ ID NO: 539 - DNA, 350 bp, Pinus radiata
gggaaagtcaccgccagtgggaaggtaacttctggagttaatgatttattttgggaacagtttctaacagagactccgggctcagcaacagatacacaagaagctgagtcaaaaattcaggagactagaactaaggatcaagatgaaaggttgcctgagaatgggaagtgttggagcaacaagcagacattggatcaacttacagaacagatggggcagctggcatcagggacgcaaacttgaaataagattatagaggctgctagtaggtgcatatcactgtcagttctgctaaaatttctggttagcaatggtcactgtttatgtgtcctaatgaattgctccaaata

SEQ ID NO: 540 - DNA, 479 bp, Pinus radiata
catatcattcatatgaatatggatagcaggcaatcaggggaagaggaagactgcaacgtcactcggccaggaggaggaggaggaatatcattacatgttagcagcgtggaatattgccagaagagtgcttgtgttgcccatgatatctcttctgatgaacaagatctgataaatagacttcacaatcttctgggcgacaggtgggcactgattgcggggcgccttccatggagaagaagagaggagattgagaattactgtaaaatgagatacacagccactacctcttcttcacgctcttgaatctccctttctctcgccaggttatggagtgtggaccaactatcgtaatcagatagtttgggttgattcagattgtttaggtttatctccacttgaaaatatgtgtggatatttgtttgtttgttttatcaaaaccaagtatagaagaaataaaatttgatcgttttatcgattta

SEQ ID NO: 541 - DNA, 580 bp, Pinus radiata
agagagagaacgtgggagaaaacctgcaaatggccgtgaagaacctctgaatcatgttgaggctgagcggcaaaggcgtgagaaattgaaccagaaattttatgagcttcgtgccgtggttcctaatgtatcgaaaatggacaaagcttctctgctcggcgatgctgctgcttatatcaaagatctcttttccaaacagcaggatttggagtccgagagggttgatatgcaggttcaaattgacactataaagaaggaattattgatgaattctttgaagttggcagctaaagaagcaaaagatctttcaagcattgaccttaaaggttttagccaggggaaattccccggcttgaattcagaagttcgcattgttggccgagaggcgataataagaattcagtgtactaaacataatcatcctgttgcgagactgatgatagcactgcaagaacttgatttggaagttctccatgcaagtatttctactgtgaaggattccttaattatccagacagtcattgttaaaatgaccagaggtttgtacacggaagaccaacttcacgccctgctttgtaag

SEQ ID NO: 542 - DNA, 445 bp, Pinus radiata
caaaagcaaggagcaagaaaagcaaatggatttgcatcaaataatattgtaattggggcagtaatattgaagtccaagggaccaggggcttattaagggcatcgagtaaagcctctgaattttcaaccttgtagaacctaattgagtaaaacttcattcagttggattctcatcgttttcatggcttacaaccgcaaacatgccgccgccgcaaccagcccggacagcagcctgggctcagacaacgagtccggcggcggaggaggaggcggcggaggaaaagggcagtcgacgaagaatggcaatggcaactacattagagagcaggatcgcctgctccccatagcgaacgtggggcggataatgaaacgggcgctgccggggaatgcgaaaatctccaaagacgcgaaggagacggtgcaggaatgtgtgtcggagttcatca

SEQ ID NO: 543 - DNA, 682 bp, Pinus radiata
aattttttcctgtcaaagcactcgagaattggggtttgtggaagattgctattgaaagatctctgtgtgcaactctgaggtctgggatggtgaaggaaaccttcgcgttgttgaaagacaataacaacaacaatcatgacgaaatattgccttcgtcggtgaagcttcaagggcggcagacttatagcttgtaaaagttttgcctttagggttttgccattagtgttgcaagcctgtaaattataatttgcaggttccatggccacgcggaatccctttgacctgcttgaggatgatgataatggcgacccgtcgtcattgctggacaccctcgctgctgcaaaggacaagccggcggcagtggctgccaagaaacagcagccagcagtgtcggcgagcggaaaactgccgacgaaaccccttcccccggcccaggctgttaaggaatcgagggtttctccaaatgaggggggcaggggacgaggtggcggtcgaggcggccgtggatttggcaacagagaatcgcaggagtttggacgtggccgtgggggaggttataatgttgaacggaacttcaaccgcgagaacaatgcctattcgggttctcgtgttgggttctatgacaacaattctgatttgatccccagccgcaatgaggatggagatggagcttcgaacgatc

SEQ ID NO: 544 - DNA, 372 bp, Pinus radiata
gtttcctcaacctagtgagtaacattcgtgaattcgttatgcaagtagcttgcggaagggcacttctatcatgttattcttattccgagctactgtcagctatatgatggacctgtgttttcatcactggctcacttcacctgtttgagtatctgccatttttggatgtttgtgtaagcttggctaaataccagagacacaaagaaaccgtcctgtagccggagttatcgaaactatttacaatgccacgggtgaaattaatttccaggaacttcatggacatggtggcagcattaccggctgcaaagttagatcggctttatgataagtcattgcatttgcgaagcgggctgaggtctctgactcctgtgc

SEQ ID NO: 545 - DNA, 444 bp, Pinus radiata
accgagtactgagtttcgaagattttcataatacagcgagaatgaatttcaggcacttgaaaagtatcggaaaaggacgcaagcatagccctatgttgtttgtccgagtcaaatgaagcactgggattcgaatctttgatcacaaaatggcaaattatacctttaagcatgcaggcccagctcattattttcactctacgaattccgtttactatttcatgaaccgggcatttatgggctacaagcgacttttattataaggcttctttcttctctttgactttcatatagctgacatgaatggcagaagagatggacacaccgacaaaaacaacaaagacgcctacatcacaggaacaaacttccacaagcactcccgtggcttatcctgagtgggctgcaccaatacaggctctatataattctggaaagacaccactccct

SEQ ID NO: 546 - DNA, 570 bp, Pinus radiata
tcgttctcaagcaccagggagagcatggaaaggcgagatcagagtccggttgcagctcgccaccccatgagaaaacactacagaggagttcggcagaggcaatggggcaaatgggtagccgagattcgcctccctcagaatcgaacccggctctggctcggcacctttgacaccgcagaagcagcagctctagcatatgaccgagctgcttacagatggcggggtgagtgcgctcggcttaatttcccccatttgttctcaaaaaagtatcagaattcctctcccagctccaccaatggcaggattcctcgcctttcttgtgaaaaatctgatcagaaatatgcatataatggtgacccagttcatacgaatgtatataagggtcccccaattcggataactgcatacaacggcgacccagttcctatagatgtatataggagtgacccagttcgggtaagtgcatatactggtgacccagttcggataagtgcttatagtggtgatccagttggcaataccgttactttagcggaatccgagcttgaaagctcctgcagccatgaatcc

SEQ ID NO: 547 - DNA, 532 bp, Pinus radiata
cttgattatatggaagaacaaaattgggatataaatggagcaaaatatgatggttcagaaaagtggaaagctcatagtagtgaacaaaaggatcttggtacaataccaacaaaggtggaaggaaggattggcaatagagagaatagtttagatgtcacacgtggtggggctctttgggacatttttcggagagaggacataccaaagttacaggattatttattaaagcactgtcaagacttcagacatagcagaaatgtatctgttgattcggttgtccaccccattcatgatcaaactttttacttgaatgaaggtcataaaaagaaattgaaggaggaataccaagtagaaccatggacatttgaacaacaccttggtgaggcagtttttattccagctggatgtcctcatcaagttagaaacttgaagtcctgtataaaagtggctttgaactttgtttcacctgaaaatttacaagaatgcattcgtttagaggatgagttgcgcttgcttccaaagaatcacaggg

SEQ ID NO: 548 - DNA, 447 bp, Pinus radiata
agggtccccgcgaaatgactgaagaggagcgggagacgaagaaggccgccagtgtggccgccacggctgccgaccaggagctcaggaagaaagtgctgcgggatctgcacgcgctgattaatcccaacgcgactggagaggcggatccggcggagtttccaggggatgatgctactgtagatggggaagtcacggacgccgagtggttttacttggtgtccatgatgaagtcatttggaaatggcttgggggtgccgggacaggcattttgcggtggcatgcctatttggatcattgggtcagaaaagcttcagagctacaactgtgagcgggctcgtcaggctcagcaattcggcattcaaaccatggtatgtattccaacacctaatggagttgttgagttgggttccacggatttaaatccgcagaactgggatttgatacaga

SEQ ID NO: 549 - DNA, 1163 bp, Pinus radiata
gtggtctaagagctgatagtttgtttttaagtggtggttttttctggatatttttcctgaatattagcggtttctattcctgcggaaggcagcagcagctggtttgaaagcagcagcagctgttttggaaacaaaacaatgtgtggaggtgccattatcaaggaattcattccggccaatcgatctcggcgtgtaactgctagggagctgtggccggatttcgacacgttcgctgaattcatcaatggcggagcaacgcaagaaacattcaataaacctggcaagttggacgagggatgcaagcagaagagtaagcccagcaagggttctgtcaagacccagcaggaattttgttccgggtttgaaggtgggagaagtgaggtgattcctcctttggaagatgtggaagggtccacacccacgattggggggaggaagagaaaaaatgtttacagaggtatcagacagcgtccatggggaaaatgggctgcggagattcgagatcccagtaagggggttagggtttggcttggaacgttcaacacggcagaggaggccgccaaggcctatgatgcagcggctaaaaggatccgaggtaagaaagctaagctaaattttgctgataactcgtgttctgttaaaaatgacactagcaagaaattgtcaggaaagaaaggaaagttgtgctcaaaacaccctgctttgttgttagagggtttcaatgcaagctgtaaggtaaaaccctcatattcagcaaatcctgatttattagggggttacaatataaacaggaaagtaaaagcctctttgagtggtgtcggcaaatctgatcttacaatctgtggatacgatgatatggaatatggtgactctgggttctcaaaacccagtgccccattccaaaacaattcaaatgcatgcacggtccaattttctgagcatagcaatttaacccaaacttcgcagaaatcgtgctcttgtgagatctgtagtcacaattactcagagatgagcaatgtaatgcctcctgcttatggcaatgctgtaaattttgaaccagtgcaaacttccaatccaggaggttattttgattctgaccatagcagcatgtcatttgaaggggcgcatttcccatgggctcaagaaataaagacgccagaagt

SEQ ID NO: 550 - DNA, 545 bp, Pinus radiata
cagctaaaactcttcatccctgctgggatgcataccagcttgaggacgaaagagcaagtgctgtttatataaatgtattttcgggggatgctacaactgaatttcccagtgcattgcaactgggcagaggagggattttggcagatgccatggggcttggtaagactgtcatgacaatatcactactgcttgcaaattctggcaaaggtggctttagtggtatggatactgtggagccctttagtgcgaacagctgtagtgaaaaaacaatcattcatccttataatataggtgtagagctgggaccatcacagtacaccaacaaaacacaaggcacaagtatgctaaggagatcaagcagtgggttacataaaggaggcgggaatcttatagtatgtcctatgacattattaagtcaatggaagacagaacttgagacccatgtacagtctggaaccatgtccgtgtatgttcattatggacaaagtagaacaaaggatgttaaaagtcttttgcagcatgatgttgtcttgaccacttatggg

SEQ ID NO: 551 - DNA, 353 bp, Pinus radiata
gcactacaagtctatacctcctccatctcatgttataaataccagttggcttctttctggtctctttgcattattgattggctggctgttttctctcttctggacctcgatcttcggtcttcatcgatatcataatctctacctctatctccatcggggcttcgttgcctctgtatgtttgtaggtatgatgtccgaagttggcagcccaacaagccaggacagccgcaactctgaggatggagaaagggagaactgtgctgtgagagagcaagataggttcatgcccattgctaatgtcattaggataatgaggaaagttctacccacccatgcaaagatttctgatgatgc

SEQ ID NO: 552 - DNA, 448 bp, Pinus radiata
caaacaatccgtgttttgggagcggagagcaacggggaggggtctttcatgggttttgagcagacgagaggaggaggaggaggtgcgaagatgacgcagcatcaggtggtaactacggagttggtacggcaggcaactgagcgcttacgaaagctttgcaggacgggagtcaaagtcgaactcagagatttttttcaactctgcatcgtgctcgccaagtcaattgattctgcggttgtatataaccaaattccgactatggtgcatgagttgccacaattagtgagacaggtttttgaacgcaaagatgatattcgacttcaaccagcaatcatggttcttatgctctctgtgaagaatgcttgtcgaagtggttggtttcgtgtcacggacacagatgaactgctaaccatgtcaaaggagctgtcaagtcgctttacgagtacgg

SEQ ID NO: 553 - DNA, 883 bp, Pinus radiata
tttttattcaaatgacagcacgacttcccttcctcagatgtttcccaggctgcactcatcagctgcagcaccacgcggttttggattctccctgttctttgttctgttgcgttaaagattggttgcaggtcgaatcgcccaggccgatttgaattctcctgaggattgacaagatgacgcgcaagtgctcgcactgtggcaacaacgggcataactccaggacgtgccctaaccgcggcggggtgaagctcttcggcgttcggcttaccgatggcccgatcagaaagagcgctagtatggggaatttgatgatgatgtccaaccctagctctcccgctgacccctccgagccggcctctgccgctgctgctgccgcggcggcggcggccagtggctatctctctgatggtcttgttgaagcctccacttcctccaattctcgcgagcggaagaaaggtgtgccatggacagaggaggaacatagaatgtttttgctaggtttgcagaagcttggcaaaggtgattggagaggaatagcacggaattttgtcataacacgaacacctacacaggtagccagccatgcacagaaatattttattcgacagagcaatatgactagaaagaagagacgttccagtctgtttgacatgacgccggtgagttttttcttcctgtcttaaattcttggtgtggtgggcatggaagggattcaggaggcgtcttgggcaaagatcccaaaaattggatttgcaatcaatcatgattcataattgttctgaaaattatgctaagaactaatctcatctttcaaacctcaaatggtattcttttgtttgaagttgtttctaagtttctttaatgtctattcataatttcattt

SEQ ID NO: 554 - DNA, 310 bp, Pinus radiata
gtgagttctaggcatgagtttgcagtatcgcaaatggcctacttacaagctttgaggaatgctggcgcaacccttagacaatttgcagaattagaatcaatggagcttcagaagacttcaccttacccacatcttcgccattatcgggtcaccttgcccccttcacctcctcctcttcccccacctccaccacctcctcctccattgtctctcaccccttctcctagttatggatctgcaacttttccttccagcatcccagtcaatcgaagcatctacagatgtccgtatcagcaatgctcaccatcat

SEQ ID NO: 555 - DNA, 463 bp, Pinus radiata
gtcaacttccagatgaagctattgctcttgcagcagcatcccatattgagagggagctgcagataacatcatggaatctgagctgcaattttgttgcctctactttgcagggtcgtgaatgtattgagcgcctggagattacagggattggagatccatcaggacggggacttggttttagttatcttcgagttgctccaaagccaccaatatcgagtgctttggttaaaaaaaaggcagctgctgcacgtggtggttccgcagttactggtactgatgctgatctccgaaggttgagtatggatgcagcaagggaggtgttgctgaagtttaatgttgacgaggaacaaattgaaaagatgactaggtggcatcggattgcaatggtgagaaagctttcaagtgagcaagctgcttcaggcgttaaagtagatgcaacagcattgaataagtttgcacgggg

SEQ ID NO: 556 - DNA, 496 bp, Pinus radiata
agatgagtggagtgagttcggctcggagctgtgtcgaggttttgttgggcagaggctgctctgtggagcggatcgctcgccgtttgagtcgggtcgcaaacgggcaatttgcgatgtggaatgtgcagaactgtggaagtagggttaatggaagacaattgtgcttctgatgatcgggagcatatagctttaatcgattatacgtttgctctttgttagttcattgggttatagttgtttcagtggagtagcgtgcagcagtttgatcggcgaaaatgaagagtccttcaaccagctgcctttctcatccagtggagggggagcagaagagcataaattctgaactctggcatgcttgcgctggaccccttgtttccttgccctcagtgggtagtgttgtgtattattttccacaaggccacagtgaacaggttgcagcttctactcagaaggtagctgacacgcacattccaaattatcctaatcttccttatca

SEQ ID NO: 557 - DNA, 642 bp, Pinus radiata
cctcaaggtacaatgggatgaaatatcagcaattgcacgaccagagagagtttccccgtggaaattagaaccttcattaactccagtggcagtgaatcctctgccagtagccaggggcaagaggcctcggccaaatatattaccttcatcttccgatttatcagtgcatgacaaggccccagtggattctactcaggtgcacaggtttccaagggtcttgcaaggtcaagaagttatgaccttggggggatctttgggtgacggtgagttggagagtggtcaaaagatggttgcatggggcggatcaaaactggatgatgtcaaagcagaaggtatgggttgtcaaagaaggttggtttcagaaaattggatgccgccacttaggcatgactcactatattcagatactttctcaagttttcaacctgtgggggaagtgcaagaattccgtggttcattaacaaatagtatcctggaagatggccagcagccaaagctttcaagaaaacagtttcaggaccaagagggtaaaattgtggatggatcaggactgtggtcaatgagttttccaaacagcttacaattgtgcgagtcaaataggaagatgtctgcgacctctgctgcccaatcgcacaagcagag

SEQ ID NO: 558 - DNA, 653 bp, Pinus radiata
ggaattgacaagtgatagtcacaggcaagcaacacttcagttggaagctgaagttacagcgtggcacatcagtttctgtagcttgataaaaagtcaacaggattatatttgtgccctgtatgagtgggcacgtctaagtcttgttcagcttgggaatgaagcacagtgggaacgaggaaaccgcccacctatttatactctttgtgatgtatggcaacaagtacttaaaagattgccagacaaggttgcttctgagtccatcaaaagcttcatctctgttgttcatgctatagtgatgcagcaagctgatgaacaaaagcgcaagaagaaagcagaaaacatttctagagagctgcaaaagaaaatgattgctttgcgcaatattgaaaagaagtattatagttcgtattcaatacctgctagggcagatgctacaacagagtctcaatttgaattgggtcacacagatcctttggcagaaaaaagagcagagattgaaatatataaaaggcggttagaagacgaaaaggccaactattcaaaatccgccagaggaaccagagaaatgaccttaaataatattcaaacaggccttccaggtctattccaagcactgagtagtttttcaagtgtgtgtgcaagttcctttgagg

SEQ ID NO: 559 - DNA, 100 bp, Pinus radiata
atggctatgggggaggcggagcggatcacggggccatggagtcccgaggaggacacatcgctgcacaagctggtggagaaatctgggccacggaactggt

SEQ ID NO: 560 - DNA, 385 bp, Pinus radiata
gttggcgccctgcaaaattcgccagaaatttattgccgaattacttcaagcccaacaatttctcaagttttggtcgccaactaaatacatatgggtttcggaagattgtaccagacagatgggagttctcaaatgagttttttcgcaagggagaaaagcagctactttctgaaatacacagaagaaaaggtctaatacaacctcctccaccacctgagaacagatccatttcaccgtctaactctggtgatgagcaaacgtggtcttccacctcctctcctaactcttccacgggggtggatgcccttagccataagaatgcaattgaagaaaatgagaaactgagaaaggaaaatctgttattggtatctgagctgacacaaat

SEQ ID NO: 561 - DNA, 328 bp, Pinus radiata
cccacatggactgcagcaccattcctccgatgatgctaatggcgatggcgataagagaattggggtggagacaggcagctctgtatgtccagagctctggcatgcctgtgctggccctctcatatctctgcctcctaagggcagtcgtgttgtgtactttccccagggtcacctggagcagattgcagacaatgagcttcacaggggtggccgtggctccttcctcaacatcaaccatgcggctgcaccgatggcagaggaagcatcttctgcagcagccttgaatataccgccatcgttcataagtcagccgtgaaccaacagatgc

SEQ ID NO: 562 - DNA, 440 bp, Pinus radiata
aggaaacgctcacgctcttaaagattagatcagaaatggattctaagttccgcgaagccacccacaaaggtcccttatgggacgaagtctcaagggctcttgcggagcacggttaccagagaagttccaagaagtgccgggagaaattcgagaatctttacaaatactacaagaaaacaaaagaaggcaaagcaggaaggcaagacggaaagcattaccgtttctttagccagctcgaagctttgtacggaggaacaactattgatgctgccgacagttgttttggcgtaacaacacggacaaatttaaccgaaagtccaggcctggactttaacggagacggagcctcgcagaaatacgctgacactcaccacaacagcgagggctttagtttgtcttcggattcttcttcggatgacgagtacagtcacgatatacag

SEQ ID NO: 563 - DNA, 359 bp, Pinus radiata
ggaaagtcgaacatagaaatcttctgtgcattcatagaataaatattctacaggctgcactgtaatttaggcgagaaatcgaataaaatatacatttgtttgtttacgatggagttggcagatgagcattccatcctccgctataagaaacccaagctctccaagaatgtcgtttccgagcgccgccgaaggcagaaaatgaacaagcttctctacactctgagggctctggttcccaatatttccaagatggacaaggcatcgattttagcggacgccatcgaatatgtggagaagctgaagcaacaggtggagagagctgagtctgacgttcaatccaccaacgtctcggctctatc

SEQ ID NO: 564 - DNA, 249 bp, Pinus radiata
agggaattcaacatcaatgctgatgtctatgcacaggattccattgagttgttgaagcagagtgggattgatttcgagaagaatgaggagaagggtatcgattcgcatcgtttcggcgagcttctcatgtcatcgggcgttgtgttgaacgaaaatgtgaattggattaccttccacagtggatatgactttgggtacctgttgaaattgctgacatgccagaacctgccccccgaggaatcggatttc

SEQ ID NO: 565 - DNA, 542 bp, Pinus radiata
agaaggttggaatggcttagtccgctcatttgatggcgaacagatctttgtggggaggttcagactttgattatgagaacgaagccgatacgaggaagggtccatggactgtggaagaggacatgcagcttggtattgtaaatttgcacggagaaggacgctggaactttctcgccagagcatctggcctccagagaactggtaagagctgccggctaaggtgggttaactatctccggcctgatctcaagcggagcaagatcactcctgaagaagaacgtttgattattgaactccatcgccgttggggaaataggtggtctcgtattgcacaaagtttaccgggaaggacggacaatgaaatcaagaatttctggagaactcgtatgaagggaaaactaaactcagaaactcagaaggacatcgccggcgtggatgcagacgacggagtacagtttgaaagcgaattgggatcttgccgcctcccagttatttcatcccatgcactgcctgaagtagacgttgcagagccttcgagtact

SEQ ID NO: 566 - DNA, 358 bp, Pinus radiata
gggacagtagggaggaagagaagacgaattcatcgatccagtattggtgtaactggtggcagaggactacggcatttcagcatgaaagtttgtaagaaagtggagagcaagggctggacaacatacaacgaggttgcatctgaattagtggccgaatttgtgaatccaaacagcacacatctttcacaagatcagcaacagtttgatgagaagaacattaggaggagggtgtatgatgcactgaacgtactgatggccatggacataatatcaaaggagaaaaaggagattagatggaaagggctacctacaacaaatctaagtgacattgaacggctaaagactgagcgaaagaggt

SEQ ID NO: 567 - DNA, 722 bp, Pinus radiata
atgcccccgagcatttgccagggcttacaacttgaagacgcacatggccactcatgaccccaaccgtcttaaacctcatgtgtgccctcaccgctcgtgtgcgcggtcatttagccgcaagcatgacctcgggcgtcacttggtcagcattcatcgtgacgattccgtggtttctacgccctctgcgtcaatgaagtctattggtgtcgacagtggccgcaggagttggtgtgacaactgcggcaaaggaacaatcggcgcatcgtgccagtgttcatgcgccgatatcaagtagttgcggatcgcgttgctctgtttaaacactatgcgtatatgccatgggcgagtatatttcgccactcgcttcgtcgcagtcgatggttgattcgtccactgcgttcttctgacgtatcattcctctatctgcgctatttccgacgtgttgcgtatcgtaccgttcagccatagatgctgaacccagtgacgaacgcgatcgcgagttgcctcatttattcgtgacccaccacgggctggacactatttgtctaactatctcgctgggatactttatctgttgttaactccttattcaacgattcttatgagcccttcgtaacttagcagatcccattttccttaacttttcattatattttggaaggcgcatcggcgtgattccaccaatactggaaataccattatttatgcatccaaaaaaaaaa

SEQ ID NO: 568 - DNA, 489 bp, Pinus radiata
ccacgctccaattttctgtagagtcgcgaggaatttccaactgagggttattctgaaggaaaacaggcgccgggagacatttgatgggttcttgagagaggaccacgagaaagtatcccaactggtcactcagcactacaaggtccagctcgagaccaaggaaatcagcgtcaagggatggaactggggatctactgatgttcaaggcaacgatctcgcatttgtcgttgcaaacaggaccgcctttgaagttcctctccgatcaatcaccaactcgaacatcgctggaaggacagaagtctctctggagtttagcacggcgcccgccccatcagctagcaaatccaaaaagggccgcccagacgaattgacagaaattcgattctatgtccctggcacgcataccaaggacgatgacgacgaggctgatatcaccaaagatgacgaggaggtttctgcggctcaggcgttccatgacatgatcaagga

SEQ ID NO: 569 - DNA, 490 bp, Pinus radiata
ggttctggtggcgtgaaaatggaggatcattctcctgtcatcatcaactctcagtcaggttattgccagtcccagcagtcatcacagatgcctttagctggctacatgtcacctcatggtattcccattcagcacactgacgatgccgcctcgaaagagactcagtaccttcgccggaggtgcttcaattgccacaccactgagccaccgagttggaggagatcgacactcacccccgggaagattgtttgcaacaagtgtggtctttatgagcgcactcatttgcgacctcgtcctcttcgttttgatgaactgagagcaggcaacaagtcgcgaaagcaaacaaagtcaagtcccaagggcgcaaaggtcatccccccggggccccttcctatcaagaaggagcctgctgagatggaggcgatctcgcggaggatgtctgtttcatccagctcttccgcccaatccggtggtggtgggtcgagtgact

SEQ ID NO: 570 - DNA, 447 bp, Pinus radiata
aagaaacctacttggggcaagagctcagcccatgaaactttctgctaaaaatgattcaaaactgggtattgcaaggcctgccaagctctacagaggagtgagacagaggcactgggggaaatgggtagcagagatcagattacctaggaatagaaccaggctctggcttggaacttttgacacagcagaagaagcagcgtttgcatatgacacagcagcctaccaactacgtggtgagtacgcaaggcttaattttccggacttgaggtatcttttgctctcaaattcggataacggtagccataatgttctttcgccaccgggtaatgcgttatctgtgctgaaatcttctgttgatgcaaagctccaggcaatttgccagcgtttatcccaggaaaattcttcagaaaatcgtctgatggcacacagtgccaacaatgaagctct

SEQ ID NO: 571 - DNA, 146 bp, Pinus radiata
cgtttctggaagccctagaaaagagagaagaggatagaatgatgagggaagaggcctggaaaaggcaggaaatggcgagattgaacaaggatcaagaattaaggtctcaggaacgttctatggctgcttcaagggatttggcatta

SEQ ID NO: 572 - DNA, 767 bp, Pinus radiata
gtcgccctgtcaaataatcccttgatcttcagcgctaaggttgaaaatggtactcctagctatgatggtctgaagcatgctaatacgaatcctatgccattttctgggttgggtaatgtttccatgggccctttgttttatcaagcaaatccaatccagcgagtcaagagagttagggacactagtttcatcatgggacccccttccagccctttcggtcgcatgggtgtgaatggtcacatggggatgaatgatgtcagtaagagcttgcagcctggttttaaggccagagttccttaccccctccaagctgctagatcggattcattcgttgctcaaggctgctttccctatgaccctaatctcagcagcactagtaatttgcccctgggagggttttcatcaggcagccatgccgttatgaatggtactttctcttcttctaggcttttttctggccagaagctggagctcccttcaagccaatttgctgagtctgtgcagactgcaggctcaagcatcaatccagttttaaataggagcactcctcttttgctgccgcccgttcctactcagacgatcaatcaagtagactacagcttctctacgccaaaaaatagtgggttgttagaatctatgttccaagaagctcaaacaatgggtggggttaaggctcattcctcctcaaattcctcgattgacctgcaggggggctccaaaagcagtatcagtaacccactgaacaatgggttcctatgcagatcaag

SEQ ID NO: 573 - DNA, 445 bp, Pinus radiata
gaatcaggatggaggagcctctgcaaattataaattcatctccgatacagcagcagcatgatcatgatgatgatgatcatgggcatgggcatgaggaggaggtaattccccaccctctgcttccccctcctggcgacacttgtattgttccatacatcatgcccgtttccacctctaccgcagaaaaacaccctccccagccaaccaatatcgcctttaacggcccggaaacagaggaagacgacaagaaacgggatagagagcacaagaagcggtccaagaactggaccagggtcgaaaccctcaagcttataaagcttcgaacagaatttgagcccaggttttctcgcagcggaagaaagacggaactctgggacgaaatagctgagtctctgcgaaaagaacagtttttcagggacgcccagcagtgcagagacaaatggga

SEQ ID NO: 574 - DNA, 731 bp, Pinus radiata
cccaggtgtcaggaatatacaggaccctcggaaaaatggtgaattgggctgaacaaagagatcagaattgaggtgagaagagcaggcaatctctgatcagaagaattgggtacttggaatcgatggatcagcagcagcccacaataccagcactacctcaagtgggttatggcacaaatccatatatagcccctccgattgggggtcctccacacccacaattagcatcataccatcaacagcttcaggccttctggggtaaccagatgagggaggttgagcaggcgcaggacttcaagacccacagcctgcctctggccagaattaagaagatcatgaaggcagacgaggatgtgaagatgatctctgcagaggcaccggtggtgtttgccaaggcatgcgagatgttcatactggaactgaccttgaggtcatggattcatacagaggagaacaagagaagaactttgcagaagaatgacatagctgcagccattggtaggaccgatatatttgatttccttgttgatattgtgcctagagatgaattcaaggatgaggggttggtgatccctagggctgcgggtgccgtgcccttcatgggtcctggggataacgtgccatcttattactatgttgcacagcaagctcccaacgtggcggcttatgctcctcctactcagcaaatgaggtccaaagcacccgcacctcctcctcatggcagcagttga

SEQ ID NO: 575 - DNA, 441 bp, Pinus radiata
cagggatcattgactctgcccaggactctaagtaggaggactgtcgacgatgtgtggagagagattcataaggaaaacattgatgggaatgggaatgcgccggcgaatcaggccaggcagccaactttcggagagatgacattggaagatttcttggtgaaagcaggggttgtgagagaggatgcagagcagggagatgggcagtcatttggggcgtttcggaatgctctagatggggaatttgtagcaaatttggcagaaagaaatggggataatagattaggtatcggtaattcacttggccttggatttggtgaaagagggcataggaatggagaagtgggtagtaacaagagtggagcagggggcgtgcctggactttctctgtctcctactaatgtcttcctaatcatgctgccatggatatggtgaatcttgatg

SEQ ID NO: 576 - DNA, 271 bp, Pinus radiata
tttcaaaggagaaaaaagaaatccattggaaggggttgcctaaagacaagtataaatgatgttgaacagcttaaggctgagaaattgctcttgaaaagtaggattgagaagaaagcatcttattttcacgaactcgaagaacagattataggccttcaaaatctggtgaaacgaaacgagcatagatatagttcagggaatactccatctgggggtgtatcgttacccttcatattggtccagactcatccccgtgccactgttgaaattg

SEQ ID NO: 577 - DNA, 315 bp, Pinus radiata
gggattcgcagagctaccagacagaaaagtggtattctatcttcagttctttctaaccagaatgcccatctcagtgtgcttgctgctgcagctagtgctgttgccacaaagagcatgtttcatgttttctacaatccaaggacaagtccagcagagttcattataccttatcagaaatatgtgaaaagttgcaagcaaccattgtctattggaatgcgcttcaaaatgagatttgaaacagaggataccgctgagagaaggtacactggcatgataactgcaataggtgatgcagatcctgctagatggcctggt

SEQ ID NO: 578 - DNA, 384 bp, Pinus radiata
caagatacccactctgaaccaatggctatggagatgggattagtcattgacggagataggttttcctcagagggtgatggagatattatgttggatggcgaggatctgttgccagaaatcaacgatatgttttgggaacaatttcttgcagagagtgcaacgtcagggggaacggaagaggctgagtctgcagcgcaggaaagtcttaccaaagatcaggatgagaaaccatctgaaaatgggaattggtggaaaaaaaatcaaaatatggataatctcacggaacagatgggtcagctggcatcagaatcaaatccttgagatttgtatcttgggatagatgcatattgtggagggaaggatttcctttcccaatttggctag

SEQ ID NO: 579 - DNA, 434 bp, Pinus radiata
gcgatggagctgttagggatgcagggaggctagtgcctgccccttttctggtgaagatgtatcgtttagtggatgatccctccacaaaccacatcgtttcttggggagagaataacaacagcttcgtggtatggcgccccaaagagttctctgcgtctgtgctgccatgctatttcaaccacgccaatttctccagctttgttcgacagctcaataattatggatttcgaaagacatttcgcgggcagtgcgagttttcgaacaaattattcgagaagggcaagcagtatctcctttgtcatatccatagaagaagagcgtccaatagctcgcccatgccgatggaatatggtaaatcatctttattattcccaatcattctacctacacaacactccaatgttctggcagcgcctctgccttcttctctgtca

SEQ ID NO: 580 - DNA, 322 bp, Pinus radiata
aaggaacggatcttaaccgaagagaacctttttcttcgtaaaaagtgtggtgatgaacatgtggattgttcggcttttagaacacctccagcacaacttagaagcatccagaacattgatgtggagactcaactggttataagacctccaactgtacaacagcaccctgacgtcgatagtcctcgataactgttgcatatgcaaattttctactttcatgaaataaacaaacagtacacctcattttgttcgccttttgtaaacgtataattactactgcatatgtaagctttcctctcaaaaaaaaaaaaaaaaaaaaaaa

SEQ ID NO: 581 - DNA, 448 bp, Pinus radiata
aggatccaaatgcgccaaagaaagccatgactggatttatgttcttttctcaagttgaaagagagaatctgaaaaagagtgacccaggaatggcatttactgatgtgggaagaacacttggagaacggtggaaaaaaatgtcagctgaggagaaagctccttacgaatcaaaagccagggctgataaggaaaggtacaaggaagcaatggccgattacaaaagtggtccaacaaatgtggactccgggaatgaatctgatagtgaatagagcatcatacttacaagttcatattaacatggctagccgtgtaaagtaattgctttcatttaaatgctttcaccctctggtgcaatctttttacattcacttgagaatattgttggtgtacttcacattagcaaaaagcaagcttacaactgagtagtgtcgagggatatacctacatg

SEQ ID NO: 582 - DNA, 321 bp, Pinus radiata
accttctttttggagtcaacatagattcctcgtctttgattgttcctaatacagtatcaaacatgaggagtattggcagcagtactgatgcagtcatgcaatttggtgtttctaattatttgaatgcacctccttgtgcttccggttccaatatttcattgaattcagacatcagtgcttctgcatgtttagatgaaagtggacttttaccacccgctgaaaatttgggacagatgaatgcacctacaagaaccttcataaaggtttataagcaagggtcagtcgggagatcgctagatatctcacgcttcagcagttatc

SEQ ID NO: 583 - DNA, 739 bp, Pinus radiata
ctgaattctatccggttgggtattaaattaaggtgattgttcgctacagacgttctgtggacaccgagtgagtctcctagccttggaatttggcaccatctcgtcccgcagccatttcagttcgatctcccgccgtcacaaaaaataatccccaattctccagctgtccctgccgtgtctgcacgcgacaggtctgcccgggctttggtctgtggaatttcatgccaatttatcacctataaactccacccgcatctgcccacaaaccccacaagtcacacccctcttcgtcttctttgaaatctcagatgggttctgccaattagctcggatccttgcctcttcagttggttttgtgagcacacacgaggccaggacccgggtatcaacgattcccctcaactgacgtaacccatggcgaccactcggcatcagcgcagtcccgatagcagcccgcgctcggaggatgaatcaggagcgcacacgtacagcaaccaggatggttccgtgaaggaacaggatcgatttctgcccattgctaatgtgagcagaatcatgaagaaagcccttccagctaatgccaagatatcgaaagatgccaaggagacggtgcaggaatgcgtttcagagttcatcagtttcatcactggggaagcctctgacaagtgtcagagggagaagaagaagaccatcaatggggacgacctgctgtgggcaatgggaactctagggtttgaaa

SEQ ID NO: 584 - DNA, 413 bp, Pinus radiata
aaatctgactatcgggatagtgatgatgaaggaggaggtactgttcgagaaggaaaggatctgcaaacctcaaatttcatcgattattttggtcaaagtaatcatacagaagaagcagaaaatgagcatgatgcatcagtggataccaaagggcccctggaatccagcaatgaagtcggccatcctaccacataccccgaatcttcttcattgtcagcgcaaggctctgagcctcgagttttttcctgtaattactgccagagaaaattctacagctcgcaggccttaggaggccatcagaatgctcacaagcgagaacgcaccttggcaaagagggggcaaagaattggggcttttcaacacaggtacataagcatggcatccctgcctctccatggctctacagaatcagc

SEQ ID NO: 585 - DNA, 622 bp, Pinus radiata
ggtctaggggaaaagctttgaaattatttgggtttgagtttagagggtcagaaggtggatcatttgaagggactaatggttctgatcagccacaagatgggactaatatattaactgcaggtgaagcatccactgagccagtggaggaagaactagtgattgaggccaaaaatggagattcagggaaattagaagatgtgggtagtccagtagaggctggagaaagtggtagcactagcaattgcctgggatcatctgctcaagaaaatcggaaatatgaatgccaatactgttgcagagagtttgcaaattcgcaggctctcgggggccatcaaaatgcgcacaaaaaagagagacagcaggccaaacgcgcgcacctgctggccaccaggagcgctgctgcgagtgccaacagaagtggcgccactgcatggtgcgggaacataaacggtaacctctaccatagaaatttccttttcaataattcctacttcacacgcatgcaggtgtttcaagaagatttcccgacctttcagaccccacaggctgttgcagctccatcaatcccgcattatatcttcagttaccagcagcagcagcaggcgcccgtgcagagtcgctg

SEQ ID NO: 586 - DNA, 349 bp, Pinus radiata
tgtaccggaaaattccaaacaaataatcaaccatggactcatattgccggagatgggctcagtggacagcgggcgcgaaggcacgagagcaattttgtccgatgattgtgtgaaattcgaatgccgatattgttgtagggttttcccgacgtctcaggctctcggcggccaccagaacgcccataaacgagaacggcgccgggcaatgacgaggtttcagagatcgccctctgacagttcaaactattcaggaaaacagaatagtattgatctgtttagccgtgagagagttcccgggtcttctctcctttcaccacacggtacgagggatcatgttgtttgcagtgac

SEQ ID NO: 587 - DNA, 368 bp, Pinus radiata
aaaaaggcgtcagaatggggtgagtctgtagtaagtacaagcgaaaacagtaatgacttggatcctcctacttattctgaaacctcttcccctgctcaaggatctgatcctcgggttttcccctgtaatttctgtcaaagcaaattctacagttctcaagcattaggaggtcatcaaaatgcccataagcgtgagagaactttggctagaagggcacagagaatggggtcttttgcacaaagatattcaagcatggcatcacttccactccacggttcctcggaaacaagttggacgcccagtcggtttttagggataaaagcacattctttgattcacaaacctttccctgaaggtgataacctgcc

SEQ ID NO: 588 - DNA, 516 bp, Pinus radiata; identical to SEQ ID NO: 483

SEQ ID NO: 589 - DNA, 340 bp, Pinus radiata
gagaactagtctcgagttagttatttgattcatattggttgcagaggattttcagagattgatgatgagtgctgaagctgctatggagagggagagttgtttcatggatgaaatgcgcaggccgcagaggaagaagaagaccgacgcagaggatgattttgacgagtgttattatactcatatgtgcaagatttgcaagaagaagttcgtctcagggcgggcttttggcggtcatatgagaattcatggccctgtggccactgccgccgccgccgctgctgagagcaatgggaaaaatctggagccgcagaggaagagatcccgtgctgaagagattcga

SEQ ID NO: 590 - DNA, 391 bp, Pinus radiata
gttgggtgtaaagggtctgacgcgtttgaggagagcttgaagcatttttgtagagtttgcaagaggagatttgcttgtgggagggctctgggtggtcatatgagagtacatggagctgaattgggtgcaattaagggtggtggtttggaagagcagtttgagaaggggagggtgaaggagcccagtaggagttgtggtgattctgtcaaggaaggagtgcaggatgaggtagagggcttgaattctatgtacactttgaggaggaacccgaagcgaagctggaggtttgcagatcaggattactcttttgcctttgggggagtagatgggtctggggctaagagatttgggtctacatttttgagggattcaagagtctgtgaggagtgtg

SEQ ID NO: 591 - DNA, 260 bp, Pinus radiata; identical to SEQ ID NO: 349

SEQ ID NO: 592 - protein, 94 aa, Eucalyptus grandis
MGERDDLGLSLSLSFPQGHLHQQQQQQQQQSLQLNLMPSLVPSSASSAQSGFNLQKRSCNDAFPSSSDRNSEARSFLRGIDVNREPSAGAAADY

SEQ ID NO: 593 - protein, 44 aa, Eucalyptus grandis
DKARLVQETGLQLKQINNWFINQRKRNWHSNPSTSTVLKSKRKR

SEQ ID NO: 594 - protein, 291 aa, Eucalyptus grandis
GEPLWIRSVETGREILNYDEYVKEFKVEAPSEGRPKRSIEASRETGVVFVDLPRLVQSFMDVNQWKEMFPCMISKAATVDVVCSGEGPNRNGAVQLMFAELQMLTPMVPTREVYFIRYCKQLSAEQWALVDVSIEKVEDNIDASLVKCRKRPSGCIIEDKSNGHCKVIWVEHLECQKTTVHPMYRTIVNSGLAFGARHWMTTLQVQCERLVFFMATNVPTKDSNGVATLAGRKSILRLAQRLTQSFCQAIGASSYHSWTKVPTKTGEDIRVASRKNLNDPGEPLGVILCAV

SEQ ID NO: 595 - protein, 25 aa, Eucalyptus grandis
MQAVMTGCDSSNIAALPSGFSILPD

SEQ ID NO: 596 - protein, 263 aa, Eucalyptus grandis
QNGPSMPPVQPFVRAEMLPSGYLVRPCEGGGSIIRIVDHLDLEPWSVPEVLRPLYESSTMLAQKTTMAALRQLRQIAQEVSQPNVSGWGRRPAALRALSQRLSRGFNEALNGFTDEGWSIMGNDGIDDVTILVNSSPDKLMGLNLSFSNGFPAVSNAVLCARASMLLQNVPPAVLLRFLREHRSEWADNSIDAYSAAAVKVGSCALPGSRIGSFGGQVILPLAHTIEHEEFLEVIKLEGMGHSPEDALMPRDIFFLQMCSGVD

SEQ ID NO: 597 - protein, 134 aa, Eucalyptus grandis
CPIDSGRSFDTSLSLGLGCYGDPEDHEIKIKKPLAKLSGNSTCLTIGLPGGEACGLGSASGDEVRNIPSRSASSFSNSSSAKREKAEQGEEEAVERGTGSPRATINIEDEDEFSPRKKLRLSKAQSSILEEMLQ

SEQ ID NO: 598 - protein, 220 aa, Eucalyptus grandis
MGQQSLIYSFVARGTVILADYTEFTGNFTSVAFQCLQKLPATNNKFTYSCDGHTFNFLVDDGFTYCVVAVESVGRQVPIAFLERVKDDFTKRYGGGKAATAVAKSLNKEFGSKLKEQMQYCVDHPEEISKLAKVKAQVSEVKGVMMENIEKVLDRGEKIELLVDKTENLRSQAQDFRQQGTQIRRKMWLQNMKIKLIVLGILIALILIIVLSICGNGKCK

SEQ ID NO: 599 - protein, 149 aa, Eucalyptus grandis
EEKKEEPPAPITVVLKVGMHCEACTRVLRKRIRKIKGVETVETDVVNDRVIVKGVVDPPKLVAYVKKRTGKQASIVKEEEKKEEEKKEEAKKEESKEGEKKDGEEGKDEDGSKMDIKKNEYWPSRPYMEYQMYPTQIFSDENPNACSVM

SEQ ID NO: 600 - protein, 107 aa, Eucalyptus grandis
MEFPSEFSEASSQKRIGGRGKIEIKRIENTTNRQVTFCKRRNGLLKKAYELSVLCDAEVALIVFSSRGRLYEYANNSVRGTIERYKKASSDSSHPQSVSEVNTQFYP

SEQ ID NO: 601 - protein, 233 aa, Eucalyptus grandis
MARGKIQIKLIENTTNRQVTYSKRRNGLFKKANELTVLGDPKVSIIMISSTGKLHEYISPSTSTKKMYDQYQQALEVDLWSSHYEKMQENLRKLKEVNKKLQLEVRRRFGEGLNGMSLSELCGLEQDMDNAVSLIRERKYKTLGNQIDTARKKKKNAEEINKSLLQDWTNLIKHLREDDPHFGMVDNGRDYEAVIGYTDAAAAARLYTLRLQPDQPNLTSGGGSEITTYPLLE

SEQ ID NO: 602 - protein, 113 aa, Eucalyptus grandis
MSQKGLIYSFVAKGTVVLAEHTQFSGNFSTIAVQCLQKLPSNSSKYTYSCDGHTFNFLTDSGFVFLVVADESVGRSVPFVFLERVKDDFMQHYSASIASGDPHPLADDDEDDD

SEQ ID NO: 603 - protein, 111 aa, Eucalyptus grandis
MGRGRVELKRIENKINRQVTFSKRRNGLLKKAYELSVLCDVEVALLIFSSRGKLYEFGSAGPSGINKTLERYQRDNFTPQDNVAEHETQQNWFQEISKLKAKYELFNKLQK

SEQ ID NO: 604 - protein, 65 aa, Eucalyptus grandis
LLQKSSQEEDKARLVQDTGLQLTQINNWFINQRKRNWHSNPSSSTVPKSKRKRSHAGDPDKERPM

SEQ ID NO: 605 - protein, 60 aa, Eucalyptus grandis
CIETKARFGKSVESPATDKWKVWFQNRRARTKLKQTAVECEMLQKCCETLKEAHSRLQKE

SEQ ID NO: 606 - protein, 188 aa, Eucalyptus grandis
MAFAGTTQKCMACEKTVYLVDKLTADNRIYHKACFRCHHCKGTLKLGNYNSFEGVLYCRPHFDQLFKRTGSLEKSFEGTPKIAKPEKPVDGERPAATKASSMFGGTRDKCVGCKSTVYPTEKVTVNGTPYHKSCFKCTHGGCVISPSNYVAHEGKLYCRHHHTQLIKEKGNLSQLEGDHERETMAPES

SEQ ID NO: 607 - protein, 66 aa, Eucalyptus grandis
FGKIFEESVRKELSPEFAKLMQEGSAYLPSGICMSTMGRHVSYEQAIAWKVLSAEENTVHCLASLS

SEQ ID NO: 608 - protein, 60 aa, Eucalyptus grandis
DGNIEKVLDRGEKIELLVDKTVNLRSQAQDFRQQGPKMRRKMWLQNMKIEADLVLGIIIA

SEQ ID NO: 609 - protein, 133 aa, Eucalyptus grandis
AQRERERENGFAGTTQKCMACEKTVYLVDKLTADNSIYHKACFRCHHCNGTLKLGNYNSFEGVLYCRPHFDQLFKRTGSLEKSFEGTPKIAKPEKPVAGERPAGPKPPVCSGDRETQCVDVRARFPTEKVTVL

SEQ ID NO: 610 - protein, 162 aa, Eucalyptus grandis
MAKEKIKIKKIDNLTARQVTFSKRRRGLIKKAEELSVLCDADVSLIVFSATGKLYDFSSSRQMKGEDLEGLNVEELDQLEKKLEAGLSLVIKNKEEKTWNEINKLQRKEAQLIKQNKQLKHEMKMILHQEKSVTVNSESVKDVYISRNSMPPLDGDSPNPSS

SEQ ID NO: 611 - protein, 43 aa, Eucalyptus grandis
MMAVTSACKDKMGIDNGKYVRYTPEQVEALERLYHECPKPSSL

SEQ ID NO: 612 - protein, 226 aa, Eucalyptus grandis
SAASLKASPFGYPGMRPTRFTGSQIIMPLGHTIEHEEMLEVIRLEGHSLAQEDAFVSRDIHLLQICSGIDENAVGVCSELIFAPIDEMFPDDAPLLPSGFRIIPLDSKSSDVQDSLTTNRTLDLTSSLEVGPASTNCVGDVAPSHGARSVLTIAFQFPFDANTQDNVAVMARQYVRSVISSVQRVAMVISPSGLGPSINPKLSQGSPEALTLANWICQSYRHVLII

SEQ ID NO: 613 - protein, 82 aa, Eucalyptus grandis
RDHWSSFSAPIDEMFPDDAPLLPSGFRIIPLDSKSSDVQDSLTTNRTLDLTSSLEVGPASTNCVGDVAPSHGARSVLTIAFQ

SEQ ID NO: 614 - protein, 234 aa, Eucalyptus grandis
LDLASSLEIGPAGNRSFNDINANSGCTRSVMTIAFEFAFESHMQEHVASMARQYVRSIISSVQRVALALSPSNLGSHAGLRTPLGTPEAQTLARWICHSYRCYLGVDLLKSSNEGSELILKNLWHHSDAIMCCSLKALPVFTFANQAGLDMLETTLVALQDITLEKIFDDHGRKTLCSEFPQIMQQGFACLQGGICLSSMGRPVSYERAVAWKVMNEEENAHCICFMFINWSFV

SEQ ID NO: 615 - protein, 100 aa, Eucalyptus grandis
MAFAGTTQKCMACEKTVYLVDKLTADNRIYHKACFRCHHCKGTLKLGNYNSFEGVLYCRPHFDQLFKRTGSLEKSFEGNPQDLQSPEKPVVERDLQRPKA

SEQ ID NO: 616 - protein, 93 aa, Eucalyptus grandis
MAFKSPGGITWLKHLLVKNFYLGEHLKCRNGLIKKAYELSVLCDIDIALIMFSPSDRVSHFSGKRRIEDVLTRFINLTDQERDTPRCPGSAHT

SEQ ID NO: 617 - protein, 41 aa, Eucalyptus grandis
MGRGRVQLKRIENKINRQVTFSKRRNGLLKKAYELSLLCDA

SEQ ID NO: 618 - protein, 62 aa, Eucalyptus grandis
EISVLCDADVALIVFSTKGKLFEYATDCCMERILERYERYSYAESQVLTNNAETNGNWTLEH

SEQ ID NO: 619 - protein, 86 aa, Eucalyptus grandis
DSSHPQSVSEVNTQFYQQEASKLRRQIREIQVSDRHLLGEGISDLSFKDLKNLESKLEKSISRVRSKKNEMLFAEIEYMQMRGLVQ

SEQ ID NO: 620 - protein, 99 aa, Eucalyptus grandis
ENSRNEWDILSNGGQVQEMAHIANGRDPGNSVSLLRVNNANSSQSNMLILQESCTDSVGAYVIYAPVDIVAMNVVLNGGDPDYVALLPSGFAILPDGPE

SEQ ID NO: 621 - protein, 72 aa, Eucalyptus grandis
TEQVHFLEKNFELENKLEPERKIQLAKDLGLQPRQVAIWFQNRRARWKTKHLEKEYEDLQASYNSLKADCDG

SEQ ID NO: 622 - protein, 79 aa, Eucalyptus grandis
NRQVTFAKRRNGLLKKAYELSVLCDAEVALIIFSTRGKLYEFCSSPSMLKTLDRYQKCSYGSVEVNKPSKELENAYREY

SEQ ID NO: 623 - protein, 242 aa, Eucalyptus grandis
MGRGRLQLKRIENKINRQVTFSKRRAGLLKKAHEISVLCDAEVALIIFSAKGKLFEYSTDSCMERILERYERYSYSEHQVLASETESIGSWTLEHAKLKARLEVLHRNYRHFMGEDLDSLSLKDLQNLEQQLESALKHIRSRKNQLMHESISVLQKKDRALQEQNNLLTRKVKEKERALAQQAQWEQQDHALDSPVVLPHYLPSLDINGSYQARHNGHDDGENLTQPRAGTLLPPWMLHRLN

SEQ ID NO: 624 - protein, 360 aa, Eucalyptus grandis
MKRLGSSDSLGALMSICPPSEELQHSPRNGNPIYHSRDLQSMLELGLDEEGCVEDQSAGGGGHVGGEKKRRLSIDQVKALEKNFEVENKLEPERKVKLAQELGLQPRQVAVWFQNRRARWKTKQLERDYGVLKSSYEALKLSYDALKHDNEALHKEIKELKSKLREEDDNPESNLSVKEEVIIPGHDVSDKIRAADDGDDDTKRSPPPPITAPPRELSFNNGGLKDGSSDSDSSAIVNEENAATSSSSPNPAVQSHGGFLKFMGSSSSSASPPPPPPASFGGCFSFQFQRAYQPQPQPPHHHHHHSPYVKMEEHNFLGGEEDCNFFSQQQAPNPQWERPQQGKRRKTNSPRGRGLQIRDR

SEQ ID NO: 625 - protein, 75 aa, Eucalyptus grandis
MGEESFIYSFVARGTMILAEYTEFTGNFPAIAAQCLQKLPSSNNKFTYSCDHHTFNFLLEDGYAYCVVAKESVGQ

SEQ ID NO: 626 - protein, 53 aa, Eucalyptus grandis
IPFSLFPPQSEGFFNPMDGNLSLQIGYNPTCLDEMNASVSSQNVAGFIPGWML

SEQ ID NO: 627 - protein, 50 aa, Eucalyptus grandis
AGGEPMWIAGPDGSSSVLNEDEYIRAFPRGIVTNPTGFKREPHDKPGSSS

SEQ ID NO: 628 - protein, 232 aa, Eucalyptus grandis
LGTQIPSGIHMPSANLSSISFLGPIPMVSGDGGGRTGSERSRNADCAPAGFPGGDEDVNKGGDIPYGMSTIVRVIPNSRYLRVAQQLLDEIVNVRKALKRSDDANDQSRHENQRSPKDADGGSKNEASSNPQESASNSSELSAAEKQDLQNKLTKLLSMLDEVDKRYKQYYHQMQIVVQSFDTIAGSGAAKPYTALALQRISRHFRCLHDAITGQIQATRKSLGEQDTSTET

SEQ ID NO: 629 - protein, 69 aa, Eucalyptus grandis
LDILEWILELIGVTYRRLDGSTQVTDRQSIVDTFNNDTSIFACLLSTRAGGQGLNLTGADTVVIHDMGF

SEQ ID NO: 630 - protein, 62 aa, Eucalyptus grandis
CWHHVHTQCGKAGFGMLKQENLSNELDRVKKENDNLQIQLRHLRGRHNITEPQRADNPRRHS

SEQ ID NO: 631 - protein, 113 aa, Eucalyptus grandis
GSKELESLERQLDGSLKQIRSRRTQYMLDQLTDLQHREQLLHEANRTLNQRLMEGYQVNALQLNQHAEEVGGYGHPPPPPLPPQPLAQPHSEAFFIPWNVNPLCKWDTSPIQC

SEQ ID NO: 632 - protein, 393 aa, Eucalyptus grandis
MVEGERNGDDDGASQGEQQWKHQQALDRLGKYVRYTAEQVEALERVYSECPKPSSLRRQQLIRECPILSNIEPKQIKVWFQNRRCREKQRKEASRLQTVNRKLTAMNKLLMEENDRLQKQVSQLVCENGYMRQQLHTTSATTTDASCDSVVTTPQHSLRDANNPAGLLSIAEETLAEFLSKATGTAVDWVQMPGMKPGPDSVGIFAISQSCSGVAARACGLVSLEPTKIVEILKDRTSWFRDCRSLEVFTMFPAGNGGTIELVYTQIYAPTTLAPARDLWTLRYTTTLENGSLVVCERSLSGSGAGPNPASAAQFVRAEILPSGYLIRPCEGGGSIIHIVDHLNLEAWSVPEVLRPLYESSKVVAQRITIAALRYIRQIAQETSGEVVYGLGR

SEQ ID NO: 633 - protein, 84 aa, Eucalyptus grandis
MGIDDLCNTGLVLSLGLETPFKIEAQRQAKQRLNFEPSLTLCLSGTTKATRDEQPPADHLYRQASPHSHNSLSAVSSFSSPRVK

SEQ ID NO: 634 - protein, 67 aa, Eucalyptus grandis
ESGEARRLRDSLVEMANVGKSPSMLTECGLAENSLVSIAERVTHHRWSWSEVKYLSDCHLMALDASL

SEQ ID NO: 635 - protein, 103 aa, Eucalyptus grandis
YSEASSDEGNQYSTREEEGEIEEFEEDTYSGAPGALPINKDQSDEDVPAEECDEYPWTSERTRNNHLPEEAGFSGSSADSPRGIRMASPSASSQKFGSLSALD

SEQ ID NO: 636 - protein, 299 aa, Eucalyptus grandis
MAFHNHLSHQDLSSLHHFAADQQPPPPQHQQQQQHLPDSSSSVHHQLHHAAGPNWLNTALLRSDAAAAAAAAAGGNSFLNLHTSSDSAASPQAQQQPPATSASAAAGHHQWLSRQHSSLLQRNHSEVIDADSIIDSADLKESVSKGDGGGGGAAESNWENAKYKAEILAHPLYEQLLSAHVACLRIATPVDQLPRIDAQLAQSQHVVAKYSAMSQGLVADDKELDQFMTHYVLLLCSFKEQLQQHVRVHAMEAVMACWEIEQSLQSLTGVSPGEGTGATMSDDEDDQVDSDANLFDGSL

SEQ ID NO: 637 - protein, 91 aa, Eucalyptus grandis
MGRRKIEIQPITHERNRSVTFLKRKNGLFKKAYELGVLCSVDVAVIIFEDRPGHSPKLYQYSSRGIQDIVQRHLHHDGETDNRGPGDFSGA

SEQ ID NO: 638 - protein, 129 aa, Eucalyptus grandis
MFSTGEYSAAAFEGMDSLPSPRKKKNQLVNRRRFSDEQIRSLESIFESESRLEPRKKLQLARELGLQPRQVAIWFQNKRARWKSKQLERDFAILRANYNALYSRFESLKKEKQSLVTQIEKLNQLVEKP

SEQ ID NO: 639 - protein, 101 aa, Eucalyptus grandis
MLYRGGMRTPNAQQIEQITAQLSKYGKIEGKNVFYWFQNHKARERQKQKRNSLGLSHCSRTPTTAATIATVTLNTTKVHRTILPYFFPHSGIGVRALHDAC

SEQ ID NO: 640 - protein, 85 aa, Eucalyptus grandis
TPSSPASDQILSSCTPQDFHGVASLLGKRSMSFTGIDVGDDPNINNGNVNGEEDLSEDDGSQPGGEKKRRLNMEQVKTLEKNFEL

SEQ ID NO: 641 - protein, 162 aa, Eucalyptus grandis
GKATASGGGGGYMSSPVPLGPFTGYASILKGSRFLRPAQQLLEELCEAGRAICTEKMTDDSCAMTEPAMDSLSGGCGIGMDDGCGGDGGEFRRKKSRLISMLDEVCRRYKQYCQQMQAVVASFECVAGLSNAAPYANLALKAMSKHFKCLKNAIADQLQFTN

SEQ ID NO: 642 - protein, 155 aa, Eucalyptus grandis
MGQQSLIYSFVARGTVILAEYTEFTGNFTSIASQCLQKLPATNNKFTYNCDGHTFNYLVENGFTYCVVAAESAGRQIPIAFLERIKDDFNKRYGGGKATTAAANSLNREFGPKLKEHMQYCVDHPEEISKLAKVKAQVSEVKGVMMENIEKVLDR

SEQ ID NO: 643 - protein, 54 aa, Eucalyptus grandis
EWWSVHNKWPYPTEADKIALAKSTGLDQKQINNWFINQRKRHWKPSEITHYKVI

SEQ ID NO: 644 - protein, 308 aa, Eucalyptus grandis
MAMQTGIGLSKILVLAGAGYTGTILFQNGKLSDLLGELQGLVKGLEKSGSQSDGDKDYSDAVAAQVRRLAMEVRQLASARQITVLNGNSSQMGNLTNMVVPAATLGALGYGYMWWKGLSFSDLMYVTKRGMANCVANLTQHLEHVSEALNSVKKHLTQRIENLDGKMDDQRELSKEIKNEVSSVKANLDGLGDDLDFLQRMVSGLDVRMGSLEYKQDWANEGVRYLCGVASGQKVEMPKMLQEQIKISGTSRGLLSYQDTPSLKGLKEIADALTLSIDRSASDAVVQDGVERLNGKPKPLPRASSTTC

SEQ ID NO: 645 - protein, 197 aa, Eucalyptus grandis
MEEYGQMNENSSTGSRGNNSFLYASPVLGPSSSGNSNYGRGNSSGGHFYSQSGDHCFQSEAPPHPVVKTEATTSHHGHAQKFHHYSLVRDHHDPSASHHHHHQHHQHQQLQTASESSREVDAMKAKIIAHPQYSNLLEAYMDCQKVGAPPEVVAKLSVARQEFESRQRSSVASADGSKDPELDQFMEAYYDMLVKYR

SEQ ID NO: 646 - protein, 304 aa, Eucalyptus grandis
EEGEDEQVLQPKIKRKRSLRVRPRHTMERPEEKSSNGALPVQCGDSAFLPLQMDHKYQPQSRTASETNPFGEPTASKHGHGGPSMKSKRQTSLRRINDPSKLHPLPKSSRSNHISSSDAAAERSRENWNGRVANPSGNSSVGAGLSEIIQRKCKNVVSKLQRRIDKEGHHIVPLLTDLWKRMGSPGHMGGVGSNLLDLRKIDQRIEKLEYGDVMDLVLDVQLMLKGAMQFYGFSHEVRSEARKVHDLFFDILKIAFPDTDFEEVRNALSFSGPGAASQSAPSPKQASAGQSKRHRALNEVDADK

SEQ ID NO: 647 - protein, 166 aa, Eucalyptus grandis
VVGKALQKCAKISTDLKKALYGSSVASCEHYSEVEASSNRIVTQDDVDAACGADDTDFQPVLKPYQLVGVNFLLLLHRKGVGGEGQGVLKYDTSLANGASLYSMQAILADEMGLGKTIQAITYLTLLKHLNNDPGPHLVVCPASLLENWERELKRWCPSFSVLQYH

SEQ ID NO: 648 - protein, 142 aa, Eucalyptus grandis
MFMVDDHALCLSCNCTFNILACCNCSYPKDSDKHMLAKQAGLTRSQVSNWFINARVRLWKPMVEEMYLEETKSREQAGSENGTTRRAATKSNKDAAGLKSASQEDNAFGMNSSIKSFQSSPNKALNQAAISPSENSNSTSST

SEQ ID NO: 649 - protein, 131 aa, Eucalyptus grandis
GAPASGQSSHALQVEETRDSPLGFVVKVEDRLSSGSGGSAVVDEDGPQLVDSGHSYFHCNDYPGSLVAVNGLQSEDDGSDDSRGYCSEIFAAAEEPHQEGGVPNGVVGVALVLGFRLLVCSRKWFKSNMCS

SEQ ID NO: 650 - protein, 152 aa, Eucalyptus grandis
SRLQAVNRKLTAMNKLLMEENDRLQKQVSQLVYENSYFRQQTQNATLATTDTSCESVVTSGQHHLTPQHPPRDASPAGLLSIAEETLTEFLSKATGTAVEWVQLPGMKPGPDSIGIIAISHGCTGVAARACGLVGLEPSRVAEILKDRPSWY

SEQ ID NO: 651 - protein, 151 aa, Eucalyptus grandis
DDVCGGGKRPERPFFCTYDGEENGDDDYDEYLHQPEKKRRLSIEQVLYLEKSFETDNKLEPDKKVQLAKELGLQPRQVAIWFQNRRARWKTKQMEKDFDKLQASFNCLKSDYESLLNEKEKLKAEVIHLTHQLEQRSNGILNHSTYLNNCT

SEQ ID NO: 652 - protein, 85 aa, Eucalyptus grandis
TAKLKSSIFLLPLHQRLILKKIERQQVFRDGFLVLLEGGLAMGIEEATKRQSIFSYPEDLYNEEYYDDQAPEKKRRLTPEQVHLL

SEQ ID NO: 653 - protein, 99 aa, Eucalyptus grandis
MEWEKQEQHHPHHHHHPHHHPQQQQQHHQQQQQPQQQQQAKEAQQQQQQQGGEGMGNGTAAGNGGGVLYVKVMTDEQLETLRKQIAVYASICEQLVEMH

SEQ ID NO: 654 - protein, 150 aa, Eucalyptus grandis
ARGPVLLAEYTEFSGNFTSVASQCLQKLPATSNKFTYNCDGHTFNYLVDDGLTYCVVAVESVGRQIPMAFLERIKEDFTHRYDAGKAATASANSLNREFGPKLKEHMQYCVDHPEEISKLAKVKAQVSEVKGVMMENIEKVLDRGEKIEL

SEQ ID NO: 655 - protein, 96 aa, Eucalyptus grandis
LQYDWHHLSFCVIISVLNLQNTINGSCSMESILERYERYTYAERQQVATDSPQVQGSWSLEYPKLVARIEVLQRNIRNLSGEELDPLSLRELQYLE

SEQ ID NO: 656 - protein, 338 aa, Eucalyptus grandis
MATYYHQSSSDPDGALQTLVLMNPASYVHYSDAPPPHQQPSAIFLNSSTAGPPASQTQQFVGIPLPGSAADSQPSSMHVNHDLSSMHGFMPRVQYNLWSSLDPSTAAREASRTHQQQGLSLSLSPQQPPPTPAGYRSFVRAERSGDGAAGSQHPPAISGGEDVRISGGSPSSASGVTNGAAVGSGMQGVLLSSKYLKAAQELLEEVVNVGNTGIKAEMLKKASGQSKPGGESAALKEEGGGDGSGKRGAELSMAERQEIQMKKAKLINMLDEVEQRYRQYHNQMQIVISSFEQAAGIGSARTYTALALQTISKQFRCLKDAIAGQIRAANKSLGEEDG

SEQ ID NO: 657 - protein, 123 aa, Eucalyptus grandis
VEQVQFLEKSFEVENKLEPDRKIQLAKDLGLQPRQVAIWFQNRRARWKTKQLEKDYETLQASFNTLKSDYDTLIKERNDLKAEVLNLTDKLLHKGNEKESSESSSKSSQGLFQNPIADSVSED

SEQ ID NO: 658 - protein, 128 aa, Eucalyptus grandis
AIISSDQMERRMLEAARKGNVHELEDLISSNELILEEMDLEGAGHTPLHVACVAGHLDFVRELLKRTPKLAEKVNTDGFSPLHIAAARGDVEIARELLTMGPHLCSVKGRERRIPLHYAAMNGKVDVM

SEQ ID NO: 659 - protein, 159 aa, Eucalyptus grandis
RLSKDQSAVLEESFKEHNTLNPKQKLALAKQLGLRPRQVEVWFQNRRARTKLKQTEVDCEYLKRCCESLTEENRRLQKEVQELRALKLSPQFYMHLSPPTTLTMCPSCERVAAPSPPSAVGRPLAAVPAHPRPVPLINPWAPAAALEIVDPPGLQEFDI

SEQ ID NO: 660 - protein, 115 aa, Eucalyptus grandis
MAREKIKIKKIDNVTARQVTFSKRRRGLFKKAGELSVLCDAEVAVVIFSATGKLFEYSSSSMKDTLERYTLHHNNLENMDQPSLELQLEHSNNMRLSKEVAEKSHRLRQLRGEDL

SEQ ID NO: 661 - protein, 118 aa, Eucalyptus grandis
QVAVWFQNRRARWKTKQLERDYDYLKSSYDSLLSDYDSILKENEKLKLEVYSLTEKLQGKEVDGAPMTGPSEPAPLEEADVQAVQFSAKVEDRLSTRSGGSAVIDEEGPQLVDSGNSY

SEQ ID NO: 662 - protein, 74 aa, Eucalyptus grandis
MEAGRFLFDPPALQGNILFLDKGSRSMMGMEESPKRRRFFCSPDELFDEEYYDEQMPEKKRRLTPEQVLLLEKS

SEQ ID NO: 663 - protein, 152 aa, Eucalyptus grandis
MYGLCGGGGGGGGGGGEEYSERALMSPENLVLPSEYQAWLCSAGFRDNRIPMYGFGSEEFVSSASGMSETASVTPDQEDAAETAIKSKIKSHPSYPRLLHAYIDCQKVGAPPEVVGLLDEIRPENGVCKRDAAVSTCLGADPELDEFMETYT

SEQ ID NO: 664 - protein, 56 aa, Eucalyptus grandis
MALAMHRECSSKQMDASKYVRYTPEQVEALERVYNECPKPSSLRRQQLIRECPILC

SEQ ID NO: 665 - protein, 135 aa, Eucalyptus grandis
MAGEEPYSADTNSDTFADEETLIPSSSEALESAWVPTSSTAHHGSKSVVNFEDVCGGGDTNTAPRPYLRQIDLKEEAVEEDYGDGNFQPPGKKRRLSADQVHFLERHFEVENKLEPERKIQLAKDLGLQPRQVAI

SEQ ID NO: 666 - protein, 226 aa, Eucalyptus grandis; identical to SEQ ID NO: 612

SEQ ID NO: 667 - protein, 147 aa, Eucalyptus grandis
VLLRFLTTATTICNNNAGGSGSGSGSGCFFMDNDVKAKIMAHPHYHRLLSAYVNCQKVGAPPGVVAKLEEACASAAIMAGNSGMSNTGCIGEDPALDQFMEAYCEMLTKYEQELSKPFKEAMLFLQRIECQFKALTLGVPSDSVALS

SEQ ID NO: 668 - protein, 176 aa, Eucalyptus grandis
GSSKGVGIPRLRFLDQQLRQQRALQQLGMMQQHAWRPQRGLPESSVSILRAWLFEHFLHPYPKDSDKILLARQTGLTRSQVSNWFINARVRLWKPMVEEMYKEEIGDAEMDSNSSSDTAKPKTGDIKSSMEDRVEEVQQSSTATQRCSSGQLMDSSFDRTPDVEMAGHSVGFNYLN

SEQ ID NO: 669 - protein, 294 aa, Eucalyptus grandis
MSEVQVTQMKSDGTLEESGEARRLRNSLEEMANEGKSPSILKECGLPENSFVSIPQKMTENRWSWSEVKYLSNCLLLALDASLEHSLLGSLMNMDRYAAAESYHKLAMAFAPVPDLHIMWLLHLCDAHQEMQSWAEAAQCAVAVAGVVMQALVARNDGVWSKDHVTALRKICPMVSSEISCEASAAEVEGYGASKLTVDSAVKYLQLANKLFSQAELYHFCASILELVIPVYKSRRAYGQLAKCHTLLTNIYESILEQESSPIPFTDATYYRVGFYGEKFGKLDRKEYVYREPR

SEQ ID NO: 670 - protein, 144 aa, Eucalyptus grandis
HTKTHHHHSIAISNPTKSMSQDYHHPSIFAFSNNGFERPDVAAASAASDQEQQHHVAQQICRDKLRVQGFDQPPPPQLVGMEEEPGGLPAYETAGMLSEMFNFPPGGAAAAELLEQPMASGYRAARPSLPTVSGTAQKTQVCIG

SEQ ID NO: 671 - protein, 125 aa, Eucalyptus grandis
IVDHMDLEPWSVPEVLRPLYESSTLLAQRTTMAALRNLRQISQEVSQPNVTGWGRRPAALRALGQRLSKGFNEAVNGFMDDGWSMLESDGVDDVTLLINSSPAKMAGVNISYASGFPSMTSAVLC

SEQ ID NO: 672 - protein, 104 aa, Eucalyptus grandis
MATAFAGTQQKCKACDKTVYLVDQLTADNKVFHKACFRCHHCKGTLKLSNYCSFEGVLYCKPHFNQLFKMTGSLDKSFEGTPKTVNRSSEQGQSNAKVSSMFAG

SEQ ID NO: 673 - protein, 131 aa, Eucalyptus grandis
DDDEDDDLFQDRFSIAYNLDREFGPRLKEHMQYCMSHPEEMSKLSKLKAQISEVKGIMVDNIEKVLDRGERIELLVDKTENLQFQADIFQRQGRQLRRKMWFQNLQMKVVVAGAVVIVIFLLWLIAKWGSK

SEQ ID NO: 674 - protein, 90 aa, Eucalyptus grandis
MATAFAGTQQKCKACDKTVYLVDQLTADNKVFHKACFRCHHCKGTLKLSNYCSFEGVLYCKPHFNQLFKMTGSLDKSFEGTPKTVNRSSE

SEQ ID NO: 675 - protein, 95 aa, Eucalyptus grandis
VYAPIDSTAMTIALSGEDTSTVQILPSGFTISSDGRIGTSSSKPAGTLLTVAFQILVSSHSGPEQLSVESVATVNTLISATVQKIKAALNWSAAE

SEQ ID NO: 676 - protein, 141 aa, Eucalyptus grandis
QMERAARKGNIHELNDLISSNEQILEEMALEGAGHTPLHIACMGGHLDFIRELLKHMPKLAEKVNPCGFSPLHIAAARGDVEIAKELLKVNTDLCSVEGRERRIPLHDAVIHGEVDVMEILLSTSPESVEKKTARKETVLH

SEQ ID NO: 677 - protein, 121 aa, Eucalyptus grandis
PSDIFLLQLCNGVDENAVGTCAELLFAPIDASFSDDAPIIPSGFRIIPLDPGSDAFSPNRTLDLASALDVGPTGNKAVGDNSGHSGNTKSVMTIAFQFAFELHLQENVASMARQYLRSIIA

SEQ ID NO: 678 - protein, 34 aa, Eucalyptus grandis
MGIDDLCNTGLVLSLGLETPFKIEAQRQAKQRLN

SEQ ID NO: 679 - protein, 110 aa, Eucalyptus grandis
INAPESDPSLTPAINRHPFSETQATTLLQATTAMISSAVQVAGPAHIDDPCRRSIGGSTGLGGATDIGSALIRFGTAAAATGDVSLTLGLRHAGNVPEKSSFSVTDLGGC

SEQ ID NO: 680 - protein, 146 aa, Eucalyptus grandis
FNEGNGTPSKQKIKEITTELSQHGQISETNVYNWFQNRRARSKRKMQNATGNNTESEAEAEVESPKEMKTKPEIFQSQQNPVSRNEDLCFQSPEISSDLHFADSQTKVESMVYPDGSLRSRNRNLGQLSFYDAMMSNSGGLAGNEH

SEQ ID NO: 681 - protein, 247 aa, Eucalyptus grandis
PIDESFADDAPLLPSGFRVIQLDPKTDGPAPTRTLDLASTLEVGSGGARPTCEADASTYNLRSVLTIAFQFVFENHLRDTVAIMARQYVRSVVGSVQRVAMAIAPSRLGGHLGPKSLSGSPEALTLARWICRSYRICAGAELLRGDSQAGDAVLKEFWHHSDAIMCCSVNTNVASPVFTFANQAGLDMLETTLVALQDIMLEKVLDEGGRKVLSSEFPKIMQQGIAYLPAGVCISSMGRPVAYEQAV

SEQ ID NO: 682 - protein, 147 aa, Eucalyptus grandis
VRLTKEQSALLEESFKQHSTLNPKQKQALARQLNLRPRQVEVWFQNRRARTKLKQTEVDCEFLKKCCETLTDENRRLQKELQELKALKLAQPFYMHMPAATLTMCPSCERIGAGPSVDGAAPTKGPFSMTTKSHLYSHHFTNPSAAC

SEQ ID NO: 683 - protein, 121 aa, Eucalyptus grandis
PLEFHNDVRLTFSNAMTYNPPSNDVHLMADTLNKFFDIRWKTIEKKLVVGGPQPSSTKSAPPEEVKAAKSTALPKKRKMSSQQEVMPAPLLQVMTDEEKHKLGQELESLLGEMPENIIDFL

SEQ ID NO: 684 - protein, 36 aa, Eucalyptus grandis
MQLYAPTTLAPARDFWLLRYTSVMEDGSLVVCERSI

SEQ ID NO: 685 - protein, 120 aa, Eucalyptus grandis
RELKTQLLRKYSGYLGSLKQEFMKKRKKGKLPKEARQQLLDWWSRHYKWPYPSESQKLALAESTGLDQKQINNWFINQRKRHWKPSEDMQFVVMDATHPHYYMDNMLGNPFPMDISPTLL

SEQ ID NO: 686 - protein, 93 aa, Eucalyptus grandis
WPFKEPVDAREVPDYYDIIKDPMDLKTMTKRVESEQYYVTLEMFIADVKRMFANARTYNSPDTIYFKIATRLEAHFQSKVQSNLQSGAGKIQQ

SEQ ID NO: 687 - protein, 185 aa, Eucalyptus grandis
MGRGKIEIKRIENTTNRQVTFCKRRNGLLKKAYELSVLCDAEVALIVFSSRGRLYEYSNNSIRSTIERYKKANSDSSNTSTVTEINAQYYQQESAKLRQQIQMLQNSNRHLMGDSLSSLSVKELKQLENRLERGITRIRSKKHEMLLTEIEYLQKKEIELENESVFLRTKIAEVDRIQQGNMVAA

SEQ ID NO: 688 - protein, 130 aa, Eucalyptus grandis
MGRGKIEIKRIENANSRQVTFSKRRSGLLKKAQELSILCDAEVAVIIFSNTGKLYEFSSSGMKQILSRYNRCQDSPESTVVEYKPESTKEDDKVVDTLKDEIAELQMRQLRLLGKDLNGLSIKELQHLEQ

SEQ ID NO: 689 - protein, 117 aa, Eucalyptus grandis
LDTALKRIRTRKNQLMHESISQLQKKEKSLQEQNNVLSKKIKENEKVMRESGQWEQQTPAPTTSSFMLQPTLPLPSLTIGNTFQTPHVLGGAEQEERSQARPANTLMPPWMIRRSNE

SEQ ID NO: 690 - protein, 140 aa, Eucalyptus grandis
YLSDLMSSGHKHKRRKQLQTVELKVRMDCDGCELKVRKALSSLDGVKTVEINRKQQKVTVNGYVDQNKVLKRAKSTGKKAEIWPYIPYSVVAHQPYIAQSYDKKAPPGHVRKVEPTATSAIVTRHEDPYMTLFSDDNPNA

SEQ ID NO: 691 - protein, 68 aa, Eucalyptus grandis
RIENKINRQVTFAKRKNGLLKKAYELSVLCDAEVALIIFSSRGKLHEFCSGPRYRVFVCYHLFFSLML

SEQ ID NO: 692 - protein, 140 aa, Eucalyptus grandis
INAGRFDQRTTHEERRLTLETLLHDEERYQETVHDVPSLQEVNRMIARSEEEVELFDQMDEELDWTEEMTNYELVPKWLRASTKEVNAAIATLSKKPSKNTLFASTIVEPNEPVSESVRKRGRPKSKKHPNYKELDDDNE

SEQ ID NO: 693 - protein, 126 aa, Eucalyptus grandis
AAQLKHSCELLGEKDGAGSSGITKGETPRLKLLDQSLRQQRAFHQMGMMEQEAWRPQRGLPERSVNILRAWLFEHFLHPYPSDADKHLLARQTGLSRNQVSNWFINARVRLWKPMVEEMYQQESKE

SEQ ID NO: 694 - protein, 53 aa, Eucalyptus grandis
FCSMLKTLERYQKCNYGALEPNVSARESLELSCQQEYLRLKARYEALQRTQRY

SEQ ID NO: 695 - protein, 86 aa, Eucalyptus grandis
KIEDVREEILRKRRAGKLPGDTTSVLKNWWQQHSKWPYPTEDDKAKLVEETGLQLKQINNWFINQRKRNWHNNSQSVTSLKSKRKR

SEQ ID NO: 696 - protein, 99 aa, Eucalyptus grandis
PVDITGMQAVMTGCDSSNIAALPSGFSILPDGIESRPLVISSRHEEKSSEGGSLLTIAFQILTNTSPTAKLTVESVESVNTLISCTLRNIRTSLQCEDG

SEQ ID NO: 697 - protein, 134 aa, Eucalyptus grandis
ENKINRQVTFAKRRNGLLKKAYELSVLCDAEVALIIFSHRGKLYEFCSSSSMLKTLERYQKCNYGAPEPSISTREAQLELSSQQEYLKLKARYEALQRTQRNLLGEELGPLSSKELESLERQLDSSLKQIRSTR

SEQ ID NO: 698 - protein, 145 aa, Eucalyptus grandis
MQEPNLAMMGGGGGGGGGGGGIVGGGGGGLGSEASFSGDHPQRQLKGEIASHPMYEQLLSAHVACLRVATPIDQLPLIDAQLAQSHHLLRSYASSVQHGHSSLSPHDRQELDHFLAQYLVVLCSFKEQLQQHVRVHAVEAVMACR

SEQ ID NO: 699 - protein, 160 aa, Eucalyptus grandis
HPDEKQRQQLSKQLGLAPRQVKFWFQNRRTQLKAIQERHENSLLKTEMEKLRDENKAMRDTIQKSCCPNCGSATTSRDTALTTQEQQLRIENARLKAEVEKLRTALGKYTPGTASPSCSAGNDQENRSSLDFYTGIFGLDKSKIMELVNQAMEELKKMAT

SEQ ID NO: 700 - protein, 72 aa, Eucalyptus grandis
PTTRTPGTKKKKSSNKKSLQGERERARTQETLNLSSPVSSKRAREKEREREREREREGVEVEERAREEEGVY

SEQ ID NO: 701 - protein, 205 aa, Eucalyptus grandis
LIRPCEGGGAIIHIVDHVDLDAWSVPEVLRPLYESSKILAQKMTVAALRHIRQIAQESSGEIQYGGSRQPAVLRTFSQKLCRGFNDAVNGFVDDGWSVLSSDGVEDVTIAVNSSPNKFLGSQYNATIFPNFGRGVLCAKASMLLQNVPPAVLVRFLREHRSEWADHGIDAYSAASLKTSSYAIPCVRPGGFPSSHVILPLAHTVE

SEQ ID NO: 702 - protein, 126 aa, Eucalyptus grandis
LFEHFLHPYPKDSDKVMLAKQTGLTRSQVSNWFINARVRLWKPMVEEMYTEEIKEQEQNGGGAEEKPSKSEREDSASKSSGLQDKAPNSNENSTKSFKPKEITSRNHDTPAISTNSASSIGGNVRS

SEQ ID NO: 703 - protein, 116 aa, Eucalyptus grandis
DKLMKHEYGWVFNTPVDVKGLGLHDYYSIIKHPMDLGSVKTRLNRNWYKSPKEFAEDVRLTFRNAMTYNPEGQDVHVMAEILYKIFEDRWAIIESDYNREMRFALDYDMGLPTPTS

SEQ ID NO: 704 - protein, 116 aa, Eucalyptus grandis
PSYGNGYSPPQYGNGPAYHPMPTYYPMGYRICAGCNTEIGHGRFLSCMNAVWHPECFCCRACTLPISDYEFSLSGNYPYHKSCYKEHYHPKCDVCSHFIPTNLAGLIEYRAHPFWS

SEQ ID NO: 705 - protein, 96 aa, Eucalyptus grandis
TWPEDICSVKSDMFDSESPHYTDAAHSSLLEPGDSSYAFEPDHSDLSQDEEDNLSKSLLSTRNYPKLENSDYAILPPNSCNFGFHAEDPAFWPWSY

SEQ ID NO: 706 - protein, 149 aa, Eucalyptus grandis
EGKLGHSNSSNSLDNGKYVRYTPEQVEALERLYHECPKPSSLRRQQLIRECPILSNIEPKQIKVWFQNRRCREKQRKEASRLQAVNRKLTAMNKLLMEENDRLQKQVSQLVYENGYFRQHTQNTTLATKDTSCESVVTSGQHQLTSQHP

SEQ ID NO: 707 - protein, 134 aa, Eucalyptus grandis
EENMQHLKDEAANMMKKIELLEDSRRKLLGEGLGSCSIEELQQIEQQLERSVISIRARKTQVFKEQIDKLKEKEKMLTAENAILTEKCGIKPPQRANECRDSPLLRESTPSSEVETGLFIGPPETRSRRLPFQN

SEQ ID NO: 708 - protein, 124 aa, Eucalyptus grandis
DKDPKRPVRDPVFAAVPDKFVASMMKRCGLILTKVMKHKHGWVFNTPVDAVGLGLHDYHQIIKNPMDLGTVKTNLERNFYHSPQEFAADVRLTFNNALTYNPKGHDVHHMAETLLVQFDQMFDP

SEQ ID NO: 709 - protein, 126 aa, Eucalyptus grandis
VSLSRVEKHASSAMNKLHEAAMKGDLAALQDLLLQDPQILHKTTSSSSDGTPLHVSCLSGHASFTKHLLTHNPELAKEADSRGSLPLHVACAKGDVEIVRALVAVDPAGCLRYDREGRTPLHLAAI

SEQ ID NO: 710 - protein, 137 aa, Eucalyptus grandis
DDLDNERASSRGGGSDEEDGDMSRKKLRLSKDQSAVLEESFKEHNTLNPKQKLALAKQLGLRPRQVEVWFQNRRARTKLKQTEVDCEYLKRCCESLTEENRRLQKEVQELRALKLSPQFYMHLFPSTTLTMCPFCER

SEQ ID NO: 711 - protein, 104 aa, Eucalyptus grandis
ADYDEGGDDNPGSRHPVTRQFFPVEEEEELEEDGERAGMGGAAVPPGFPRAHWVGVRFRQSDHHPIGSGKGSPILEGSQPMKKIRKGPRSRSSQYRGVTFYRRT

SEQ ID NO: 712 - protein, 138 aa, Eucalyptus grandis
DDLDNERASSRGGGSDEEDGDMSRKKLRLSKDQSAVLEESFKEHNTLNPKQKLALAKQLGLRPRQVEVWFQNRRARTKLKQTEVDCEYLKRCCESLTEENRRLQKEVQELRALKLSPQFYMHLSPPTTLTMCPSCERV

SEQ ID NO: 713 - protein, 128 aa, Eucalyptus grandis
ESQKLMEAVQNGDVSAAVDLLDQDPLLLDRIIVLGVSDTPLHAASVLGHADLVRELLRRAPRLASEQDSRGNSPLHLAAGKGHGEIVGELLSADPAAASARNLDGRAPIHVAAIKGRVDAVGRMVGAV

SEQ ID NO: 714 - protein, 93 aa, Eucalyptus grandis
YSGYLSSLKQELSKKKKKGKLPKEARQKLLSWWELHYKWPYPSETEKVALAESTGLDQKQINNWFINHVIECWVKSMATLMQEIFLMTKVILR

SEQ ID NO: 715 - protein, 127 aa, Eucalyptus grandis
TFSFGILKAGEGGDGVADDELGVTRQLFPVREVDADMEWCGESSSLDKRSDVFLVGACKEKEGPRLAMPQQRRKSRRGPRSRSSQYRGVTFYRRTGRWESHIWDCGKQVYLGGFDTAHAAARPMIEL

SEQ ID NO: 716 - protein, 35 aa, Eucalyptus grandis
SEDMQFMVMDGLHPQGAALYMDGHYIGDGPYRLGP

SEQ ID NO: 717 - protein, 179 aa, Eucalyptus grandis
AAFEGMDSLPSPRKKKNQLVNRRRFSDEQIRSLESIFESESRLEPRKKLQLARELGLQPRQVAIWFQNKRARWKSKQLERDFAILRANYNALYSRFESLKKEKQSLVTQIEKLNQLVEKPQGEGQSCGHDLATNSTDRESDNGVPKYEDSQPVFPDKLTRLMGIPCEDDYFGLKRAEPP

SEQ ID NO: 718 - protein, 142 aa, Eucalyptus grandis
NLTDKLLHKGNEKESSESSSKSSQGLFQNPIADSVSEDEVSRVPIPTWPEDICSVKSDMFDSESPHYTDAAHSSLLEPGDSSYAFEPDHSDLSQDEEDNLSKSLLSTRNYPKLENSDYAILPPNSCNFGFHAEDPAFWPWSY

SEQ ID NO: 719 - protein, 207 aa, Eucalyptus grandis
EKRTPKKRGRKPGLGRDTPLNHVEAERQRREKLNHRFYALRAVVPNVSRMDKASLLSDAVSYINELKSKIGDLESQLQRESKRVKQEVTDATDNLSTTTSVDHSSPSGCGGSLLEVEVKIVGCDAMIRVQSENANYPSARLMAAMRDLELHIHHASLSTVNDLMLQDVVVSVPEGLKGEEDLRAALLRALEQRSEKLPGEREREYVL

SEQ ID NO: 720 - protein, 128 aa, Eucalyptus grandis
EDDKLGRNRASANVVQSSSVKGRPSGGTLVVCPTSVLRQWGDELKNKVSEKAKLSVCMYHGTTRTKDPYELANYDVVLTTYSIVSMEVPKPAGFKDEKDSLQDDDDAFFGRKRKHSAKSEKRRLKKEM

SEQ ID NO: 721 - protein, 114 aa, Eucalyptus grandis
FRLFINWLLDFNSADSAIDSAHFQILTAFANAFHALQPLKVPAFSFAWLELVSHRSFMPKILSGNSQKGWPYFQRLLVDLFQYMEPFLRNAELGLPVHFLYKGTLRVLLVLLHD

SEQ ID NO: 722 - protein, 183 aa, Eucalyptus grandis
MNRERLMKMAGSVRTGGKGTMRRKKKAVHKTTTTDDKRLQSTLKRIGVNAIPAIEEVNIFKDDVVIQFLNPKVQASIAANTWVVSGSPQTKKLQDILPGIINQLGPDNLDNLRKLAEQFQKQVPGAATGSGATGMQDDDDDEVPELVPGETFEAAAEEGQATQVTEATQVTEATKVTEATPAS

SEQ ID NO: 723 - protein, 54 aa, Eucalyptus grandis
GSCQKGDSCEYAHGVFESWLHPAQYRTRLCKDETGCARKVCFFAHKPEELRPVY

SEQ ID NO: 724 - protein, 124 aa, Eucalyptus grandis
MASSSGTSSGSTLIQNSGSEESLQALMDQRKRKRMISNRESARRSRMRKQRHLDDLMLVVAQLRKDNQQLRDNVNVVNQHYMTLETENSILRVQMNELTNRLESLKDILGILDAGDGGRPGNGG

SEQ ID NO: 725 - protein, 120 aa, Eucalyptus grandis
MTDGHLFNNISLGGRGGSNPGQIKIFSGGISWRRQGGGKAVEVDKSDIVGVTWMKVPRTNQLGVRTKDGLHYKFTGFRDPDVISLTNFFQNTCGLTPEEKQLSVSGRNWGEVDLSGNMLT

SEQ ID NO: 726 - protein, 58 aa, Eucalyptus grandis
RLGPMGPKTLCNACGIRYKTGRLFPEYRPSASPTYVPSLNIVSNEIPSSHLWLSLLQK

SEQ ID NO: 727 - protein, 78 aa, Eucalyptus grandis
GVAIDVKIMGWDEVVRVESGRKDHPAARLMVALQELNLELQHASVSVVNELMIQQATVKMGSQLYTQEQLKAALLAVI

SEQ ID NO: 728 - protein, 123 aa, Eucalyptus grandis
KPPMKKQKSKPAAASETAGPARRCSHCGVQKTPQWRAGPNGAKTLCNACGVRFKSGRLYPEYRPACSPTFSSELHSNHHRKVLEMRRKKESMTTTALGQPEPGRARAQLLRARVGSSWRPREI

SEQ ID NO: 729 - protein, 213 aa, Eucalyptus grandis
AAGLLRCGKSCRLRWINYLRPDLKRGNFTEEEDEIIIKLHSLLGNKWSLIAGRLPGRTDNEIKNYWNTHIRRKLLNRGIDPATHRLINEPAQDHHDEPTISFAANSKEIKEMKNNAELNFMCNLEESADVASSARERCPDLNLELGISPPSHQLHQPEPLLRFTGRKSDLCLECNLGLKNSQNCRCSVGVIESETSVGYDFLGLKASVLDYRS

SEQ ID NO: 730 - protein, 61 aa, Eucalyptus grandis
MSVLSKSDSVEIREVWEYNLEDEFSFIREIVDDYPYIAMDTEFPGMVLRPVGNFKSSSESH

SEQ ID NO: 731 - protein, 94 aa, Eucalyptus grandis
MRRKKKAVHKTTTTDDKRLQSTLKRIGVNAIPAIEEVNIFKDDVVIQFLNPKVQASIAANTWVVSGSPQTKKLQDILPGIINQLGPDNLDNLGS

SEQ ID NO: 732 - protein, 103 aa, Eucalyptus grandis
YWETLMFFQSEELLHNSCVSEVISRFNGPSSPDAAALPVASKSIDLERNRRKKLNERLFALRALVPKISKMDKASIVKDAIDYIQDLREQEGRSEPRSQSSNL

SEQ ID NO: 733 - protein, 78 aa, Eucalyptus grandis
GVAIDVKIMGWDAVVRVESGRKDHPAARLMVALQELNLELQHASVSVVNELMIQQATVKMGSQLYTQEQLKAALLAVI

SEQ ID NO: 734 - protein, 122 aa, Eucalyptus grandis
GIYSCLNLDASNGGSSAIDPSISSAILDDFCTIKDGPFPNLSDCLVGNFSSSQDVQSQITSASLADSQAFSRQDFPDNSGGTSSSNVDFDESSILKNSTWQQQVAPPMRTYTKVQKAGSVGR

SEQ ID NO: 735 - protein, 133 aa, Eucalyptus grandis
MGSSASSQRPDNLQDKVGPVSVSDEEWKKRLTPEQYYVARQKGTERAFTGEYWNTKTPGTYHCVCCDTPLFESNTKFDSGTGWPSYYQPIGNNVKSKLDLSIIFMPRQEVLCAACDAHLGHIFDDGPPPTGKR

SEQ ID NO: 736 - protein, 163 aa, Eucalyptus grandis
MVDKCGEGLLVAVEAQKAVPAPFLTKTYQLVDDPSTDHIVSWGDDDSTFVVWRPPEFARDLLPNYFKHNNFSSFVRQLNTYGFRKIVPDRWEFANEFFRKGEKHLLCEIHRRKTAQPQLTHHHPHSASPLSGPTPAFFPFPSRLSISPSDSDDQHSSHWCDSP

SEQ ID NO: 737 - protein, 172 aa, Eucalyptus grandis
MALEALSSPTAPSAPFQFMKDSSPAAAAAAASSSSSAYDLPLAEPWAKRKRSKRPHNPPSEDEYLALCLIMLARGGAGRTLPPPPPPAVSSEAAKVAYRCPVCDKGFPSYQALGGHKASHRKHASSAAAAAGGDDQPTTSSTSAATTSSGVSGKVHECSICHKSFPTGQALG

SEQ ID NO: 738 - protein, 78 aa, Eucalyptus grandis
ISSSRWPRQETLTLLEIRSRLDPKFKEANQKGPLWDEVSRIMSEEHGYNRSGKKCREKFENLYKYYKTTKEGKAGRQD

SEQ ID NO: 739 - protein, 135 aa, Eucalyptus grandis
MGPQMNFRNLADVPAAERSTGGQPGIPLLSRQSSVYSLTFNEFQNTWSGLSKDIGSINMDEFLKNIWTAEESQLQLQDMAPSGNGGEGGGQVGNLLRQGSLTLSRTISQKTVDEVWRELFKETEDVKEGSREGGD

SEQ ID NO: 740 - protein, 49 aa, Eucalyptus grandis
DFERNRAEGVDSARFAELMISSGLLCNDAVIWVTFHSAYDFGYLVKILT

SEQ ID NO: 741 - protein, 101 aa, Eucalyptus grandis
MNFSDKEVQLASDHPKKPAGRKKFRETRHPVYRGVRLRDSGKWVCEVREPKKKSRIWLGTFPTVEMAARAHDVAALALRGQSACLNFADSAWRLPKPASTD

SEQ ID NO: 742 - protein, 113 aa, Eucalyptus grandis
GMDSRTSSRISGVTLQEVPPTSSQVPEIPPALGASANDPSSAVSELKAPSQGTAKVTTNQFPDMGMLAGAQESEAVSVNQADTVMTGISQTQDMVLEDIANISRDDYMGADLH

SEQ ID NO: 743 - protein, 200 aa, Eucalyptus grandis
KAYARRQHAWLTGANEVDSKTFSRAILAKSARIQTVVCIPLLDGVVEFGTTERVQEDISLVNHVKTFFVDHHPPHPPKPALSEHSTSNPAATSSGHHRFHSPPVPSYAPADPPAAANQGDEEEEDDDDDEEEGESDSEAETGRQGAAAAAQNPHGAGPANNAEPSEFEMSEDIRLGSPDDGSNNLDSDFPMLTINSTAAD

SEQ ID NO: 744 - protein, 327 aa, Eucalyptus grandis
DGSCREPKDGEESEATRILNLRLEDEGQQRMRKRVLDKLHTVFGGSDEDNYALGLDRVTDMEMFFLASMYFLFPSGEGGPGKCFASEKHVWLTDALKSSSDYCVRSFLAKSAGIRTIVLVPTDVGVVELGSVRSVPESSELVQTIRLSFSTNSFMSVKPIAALPMTNEKKDENAPFSNLALAGKGEAISKIFGKELTTVNSPGHYREKLAVRKMDSRQSWEPHHNGSKLPFSTPRNGTQDTSWAHHAHGVKQLSPVEFYGSQTSASKLEERMNSGRNDFGLNRYPTPKQVQMQIDFTGATSRPSVITRPFTADSEHSDVEASCKEEQ

SEQ ID NO: 745 - protein, 361 aa, Eucalyptus grandis
MMMMTMAAGGGDHHARSTPTVQIPPVWDPLDDPATGGCGGPYSPYSPYSPYSGGGNAGGAAGGGECCNDLTALRRFLPSNHHQDEEDEEDGRAPGEDGVLGCDEFRMYEFKVRKCARGRSHDWTECPYAHPGEKARRRDPRRFFYSGTACPDFRKGACKKGDTCEFAHGVFECWLHPERYRTQACKDGQSCRRRVCFFAHSPDQLRVLPAHQQQQQQQQQQQHSPKSATDSEFGSPVRPSAAAAAAFDSYFTKPWSASFISSPTSILTTSSPPISPPTNSPPMSPNQRGGCCGSPGSVSELVACMRNMQIAKMKMSPRGQMGGSLFGSPLRPGCHLAAPVTPRAESSPRYGQLGGGGGGGL

SEQ ID NO: 746 - protein, 78 aa, Eucalyptus grandis
LIRWRKHRRVRWAVGATRAAASRARSSGGVREQDRYLPIANISRIMKKALPANGKIAKDAKDTVQECVSEFISFITSE

SEQ ID NO: 747 - protein, 278 aa, Eucalyptus grandis
MATPDERPSSSSSAASAVAIRQVWAWNLDAEFGLIRDLIDRYPFVSMDTEFPGLVFRRPAGAGAGARPSPSDHYRLLKSNVDALSLIQVGLTLSDARGGLPGFIWEFNFREFDAARDPHAPDSIELLRRQGVDFDRNRAEGIDSARFAELVMSSGLVCNDAVSWVTFHSAYDFGYLVKALTRRELPGDLPEFLAVVRVFFGDRVYDVKHLMRFCHSLHGGLDRVAAALELDRAVGKCHQAGSDSLLTWQAFRKIRDVYFANDDGPEKHAGVLYGLEVY

SEQ ID NO: 748 - protein, 31 aa, Eucalyptus grandis
MATGVEGNEGVPANLRKQLAVAVRSIQWSYA

SEQ ID NO: 749 - protein, 229 aa, Eucalyptus grandis
MNHFFSSYSDPSSCSLDFAEASSSSSPLSDGRSAMVPGNFSDEEVLLASHQPKKRAGRKKFQETRHPVYRGVRRRSSGKWVCEVREPNKKSRIWLGTFPTAEMAARAHDVAALALRGRSACLNFADSAWRLPAPASADAKDIQQAAAQAAEAFRPAESEAEDVMSGYEKKSPSEEGMLYDDEDVFGMPGLLTNMAEGMLLPPPQCGGDGYGGEDDGNLDAYVSLWNYSM

SEQ ID NO: 750 - protein, 210 aa, Eucalyptus grandis
MPIRIQNLPKKNFDQGSSLSMPHVGVTYPPWWSLNEQQLPQSLPKNSGLKAESPPMLHHQAKHLGLQLQEQESSSTQSAGNSCHEVSVVGGANSQDQSISSESGQDESCGRSFEGQTKPIFMFNNPEIVFNSSLADQNQPLIRVPYPPVDPYYGGLLTAYRPQAIIQSQVGSQMFGMAPGRVPLPLNLADHGPIYVNAKQYSRNSSEEAV

SEQ ID NO: 751 - protein, 93 aa, Eucalyptus grandis
GYGFVRFGDETEQLRAMTEMNGMYCSSRPMRIGPAANKKPIATQQYQSASYQNSQGNQGENDPNNTTIFVGGLDPSVSDDLLRQVFSQYGELH

SEQ ID NO: 752 - protein, 97 aa, Eucalyptus grandis
GYRRSAKKCKEKFENVHKYYKRTKEGRAGRQDGKTYKFFSELEALHNTAAGATVGISSSFKWWWCCFWHCSPGRSLGTPSFDRDIVRQPRPNLHCPR

SEQ ID NO: 753 - protein, 241 aa, Eucalyptus grandis
MEMEDHHQYTAADLRHLINARPPPPPPHIQSISPPELFCGGGGHRNPTQHLESMMMGGGGLHNGQRQGHSHNHQHHHQFGRDHSSPSSVAMAGAAGGLESENGGNGRWPRQETLTLLEIRSRLDSRFKEANQKGPLWDEVSRIMSEEHGYQRSGKKCREKFENLYKYYKKTKEGKAGRQDGKHYRFFRQLEALYGENANSNSILQAPSLPHSLHFHPPPNINDINQDASHHRHPHQLQRPC

SEQ ID NO: 754 - protein, 104 aa, Eucalyptus grandis
MERGDPNVVAVARLRREDCERTKHDSAFATWKVLVGPTDWEDYSLGKEGAARYRVHNLPKSPGPGIYELGVAASHAKLGREIAKLDPRYIVVVYLGKADCVRTR

SEQ ID NO: 755 - protein, 229 aa, Eucalyptus grandis
MGYAQLVIGPAGSGKSTYCSSLYQHCEAIGRTIHIVNLDPAAENFDYPVAMDIRELISLDDVMEELGLGPNGGLMYCMEHLEENLDDWLTEELDNYLDDDYLVFDCPGQIELFSHVPVLRNFVEHLQRKNFNVCGVYLLDSQFITDVTKFISGCMASLSAMVQLELPHVNILSKMDLVKNKRDIDDYLNPEPRVLLSELNQTMAPKFEKLNKALAELVDEYSMVSFIPL

SEQ ID NO: 756 - protein, 81 aa, Eucalyptus grandis
YPTIIYRPYSFMAKISAVERGHFLTVIPHFAWRLVNPATLKYFDAPHRPMYMQEYLYSIRNHRYTATMLQHIAEDRDGTSH

SEQ ID NO: 757 - protein, 115 aa, Eucalyptus grandis
MPKGSSIKMGVPLQHSSGIKQLNVHFQERDLCSTQSTSQSFSEVPNIGGSTDCSQATVLEQTEHGETEGQSVRGQAKSALSMGTQDLVFQPLEVCIPLHYAEPSLGGFMPAAYGP

SEQ ID NO: 758 - protein, 356 aa, Eucalyptus grandis
MKERQRWRAEEDALLRAYVKQYGPREWHLVSQRMNTPLNRDAKSCLERWKNYLKPGIKKGSLSEEEQRLVIQLQAKHGNKWKKIAAEIPGRTAKRLGKWWEVFKEKQQREQKENKGALPIDEGKYDHILENFAEKLVKERSTPALLMATANGGFIHTDSPALAPTLLPPWLSNSNGTPTLRPPSPSVTLSLSPATVPASQPIPWLQADRGLDSGSLSLTGLPNHGPLPTSGENILMSELAECCKELEEGHRAWAAHKKEAAWRLKRLELQLESEKACRRREKMEEIEAKINTLREEQKASLDKIETEYREQLAGLRKDAESKEQKLAEQWTAKHVQLSKLIEQIGFRPRIADHDRQ

SEQ ID NO: 759 - protein, 93 aa, Eucalyptus grandis
GLDSCSVEELQQTENQLERSLTKIRARKNHLIREHIERLKAEERKLLEEKRKLLQEIECGKGLTPVSSEPPREEIRAESMDVETELFIGPPKR

SEQ ID NO: 760 - protein, 70 aa, Eucalyptus grandis
EDPVGRPESASEISQEPGQEFMDEDELLNMPKLLDDMAEGMLVSPPRTQMASENDSPEDSDGGESLWSYP

SEQ ID NO: 761 - protein, 243 aa, Eucalyptus grandis
MCGGAIISDFVEERLDRRRPGSCRPERKLTPHELWSELDPASDLLSLDGPVAQGHPNPFSLVANQLNQVMKSEEKNSEEAGHGHVSETQKSQSNGRSQRARKNVYRGIRQRPWGKWAAEIRDPHKGVRVWLGTFKTAEEAARAYDEAAKRIRGDKAKLNFSGPPAPAQPSAKKRCVAPDEPKDEAGAAGCELKERIASLESFLELEPTEEPLEPGTGPSPADLWMLEDLVTHHQHRFDNQLVY

SEQ ID NO: 762 - protein, 125 aa, Eucalyptus grandis
QQRLLQYWSDALNLSPRGRMMMMNRLGPDGRPIFRPPQPINTTKLYRGVRQRHWGKWVAEIRLPRNRTRLWLGTFDTAEDAALAYDREAFKLRGENARLNFPELFLNKDKAEESAGPSSSSSSPP

SEQ ID NO: 763 - protein, 141 aa, Eucalyptus grandis
SIPSVGLLVQYKLLNPASSYSSCIMIQDMSQGFRKIDTDRWEFANRGFQEGKKHLLKNIRRRRKLSDHRTTSSSTVASDYPEAGKEAELEMLKRDQEALKAEILKLREERENSQHEINQVIERFRYAECRCRRMFLFLSKA

SEQ ID NO: 764 - protein, 202 aa, Eucalyptus grandis
KHLLNNIYRRKPIHSHSGQGARLSDSEKQMYEEEIKRLRHEKSSLQLELQRYQGDNQDVDFQIQLLRKQFQNMEQKQTHLITVLAQLMQKPVFASLFTQQSDSPTKKRRLAELDHLHDSDDKSGLESLKFQKEKFNGVPFSLLDLDSVEKLEQSLHFLENLLQGVDNTSGAEQHDFGAISLPWPAGFTERKESLDDSDRHIH

SEQ ID NO: 765 - protein, 175 aa, Eucalyptus grandis
MQPKSKISNGVDAHPHSIQTSAVFTEPWWRGYNTISPADPGRNETHAPLGCINGGSESNGGQSQSNEERVEEDDDDDNVKGSGNPACSGAVGNQGQGPQNGHGAPTIITMRDDGLAQPPQLELVGHTIACASNPYQDPYYGGLMAQYGHQSMAYPFVGIPHARMPLPLDLAQEPC

SEQ ID NO: 766 - protein, 190 aa, Eucalyptus grandis
TGANEKDSVMEITFHVPNSNTQFVGDENRPPAQVFRDRIMSVADVGAGGEDAVVTFEGIAILTPRGRYSVELHLSFLRLQGQANDFKIQYSSVVRLFLLPKSNQPHTFVIITLDPPIRKGQTLYPHIVMQFETDYVVQSTLSMNDDLFNTKYKDKLEPSYKGLIHEVFTTILRGLSGAKVTKPGKFRSSQ

SEQ ID NO: 767 - protein, 251 aa, Eucalyptus grandis
LETSGNRLARAISDADTSSAAALMDMLEQMVSVMGDPIQRLGAYLLEGLRAKLKFSGSIIYRKLKCEEPTSSELLTNMQVLYQICPYWKFAYVSTNVIITKAMENEQRIHIVDFQITQGSQWVTFIQALAQRPGGPPLLRITGIDDSDSVHARGAGLEIVGQKLSEIAESCNVPFEFHDAAVSLSEVELQNLMIRPGDALAVNCPYILHHIPDESVSTQNHRDRVLRLIKSLSPRVVTLVEQESNTNTSSF

SEQ ID NO: 768 - protein, 174 aa, Eucalyptus grandis
GNWDEPTKEEVNEPADIAEAKTVSDSEEAKPNAKRKQPEKEASEKEASKKEPNKPPNSWFDLKVNTHVYVTGLPEDVTMEEVVEVFSKCGILKEDPETKKPRVKIYVDKETGRKKGDALVTYLKEPSVALAIQILDGAPFRPGGKVPMSVSQAKFEQKGDKFISKQVDGKKKRN

SEQ ID NO: 769 - protein, 218 aa, Eucalyptus grandis
TFEQLLLPFLYELQILIDLSNDKATVLTDKIQVLKDLTTEVNKLKAECAALIEESREEKNELREEKSSLKSEVENLNVQYQQRTRVMYPWAAMDPSVVMGPAYSYPGPIPVTPGPIPMLSQLQPFPFFGNQNASAIPAPCSTFIPNSMPANPTFEQQSTQYASTSHVSNKKDSKSRSSDHQRGSIAEQDEDSNNVATDLELKMPGTSSHQDLTSGEKK

SEQ ID NO: 770 - protein, 188 aa, Eucalyptus grandis
HPMKPESVEVLNFGDSGSGRLLSSHSQVAVAEEPLNHVEAERQRREKLNQRFYALRAVVPNVSKMDKASLLQDAESYIRELNMNLQAAESDKEDLKKQLDELKKRSSDKECIPVDQDRKMAKPTGSRSTGVAIDVKIMGWDAVVRVESGRKDHPAARLMVALQELNLELQHASVSVVNELMIQQATVK

SEQ ID NO: 771 - protein, 157 aa, Eucalyptus grandis
MMLGEPHRPPNPTIDVPPWPILDDPTDDAVPHSPYSPYTLNAGYGGGCDSSPSAAGPGHFQDVMAALRRFLPSNRPDTDPDPDMTSSREADFPMDVYSCDNFRMYEFKVRRCARGRSHDWTECPYAHPGEKARRRDPRKYHYSGTACPEFRKGSCRK

SEQ ID NO: 772 - protein, 129 aa, Eucalyptus grandis
DEPSTSATNSGGGAAAASSSGGGRSHECSICHKSFPTGQALGGHKRCHYDGGASGSANSGVTTSEGVGSAAPPALGYDSGRRNFDLNVPALPEFPTGFIVSGDDEVESPHPSKKPRFSTPLKIKLSPEQ

SEQ ID NO: 773 - protein, 149 aa, Eucalyptus grandis
MAFEQYFAQEWRPIPGPAMDSGSSDGCFDCNICLDFAIEPVVTLCGHLYCWPCIYKWLHVQSASLASDEHPQCPVCKAEISHTAMVPLYGRGQSSKESDLQDKALQLGTIVPPRPAACGIQALASTTPRSGQQLPYRNPYQNPYYSANS

SEQ ID NO: 774 - protein, 175 aa, Eucalyptus grandis
MVKRDREDTEVEALARANCLMLLSRVGESTDSASPDRKSRPTERMFACKTCNREFSSFQALGGHKASHKKPKLISGDLFHLGHAADSSPAKPKTHECSICGLDFPMGQALGGHMRRHRAAMLESLAAAAAKPVPVLKKSNSKRVTGLDLNSLPMEDDLTLRLGKVAPPLVLDLVL

SEQ ID NO: 775 - protein, 154 aa, Eucalyptus grandis
PDAAGERLGHGDQEEPLGVGGVGLPGRAYFSSNPAWVTGAERLGNCGCDRARQAQIFGLQTIACVPVLNGVVELGSTEPIYQSSDLISGIRGLFNFHESEMGCGGRVLNSEHDPASLWICDPPVTMEINDRPMTFQIENPSSSSLTESPSAICA

SEQ ID NO: 776 - protein, 177 aa, Eucalyptus grandis
LGTQIPSGIHMPSANLSSISILGPIPMVSGDGGGRTGSERSRNADCAPAGFPGGDEDVNKGGDIPYGMSTIVRVIPNSRYLRVAQQLLDEIVNVRKALKRPDDANDQSRHENQRSPKDADGGSKNEASSNPQESASNSSELSAAEKQDLQNKLTKLLSMLDEVDKRYKQYYHQMQIV

SEQ ID NO: 777 - protein, 59 aa, Eucalyptus grandis
GNEVSSDYGWKFLFAGLQRCGKSCRLRWLNYLRPDIKRGNISPDEEELIIRLHKLLGNR

SEQ ID NO: 778 - protein, 175 aa, Eucalyptus grandis
MHHPPNPDSLSLLQSARTPNAPPEHPVPSTSRRDEVAVLKSQKAGREKLRRDRLNEHFIELGNTLDPDRPKNDKATILSDTVQLLKDLTAQVNQLKAEYSTFCEESRELTQEKNDLKEEKASLKSDIESLNAQYQQRARAMFPWPIMDHSVVMAPPSYPYPVPVAVPSGPIPVHP

SEQ ID NO: 779 - protein, 162 aa, Eucalyptus grandis
MNVEKLMKMAGSVRTGGKGTMRRKKKAVHKTTTTDDKRLQSTLKRIGVNAIPAIEEVNIFKDDVVIQFVNPKVQASIAANTWVVSGAPQTKKLQDILPGIINQLGPDNLDNLRKLAEQFQKQSPGAAATAGATAMQEDDDDEVPELVPGETFEAAAEEGHKS

SEQ ID NO: 780 - protein, 151 aa, Eucalyptus grandis
MGEPIFLPGRTSLVGSISVNVVGIQHNAGTFRAGETVALVREPSNTDDEMAIQVLNTRGMVVGYIKREAAKVLAPLIDSQLISVYAIVPKVPRVEKLFFINCQVRVLARDDDFEHVKSTILEGKLMLTPPVGKEVRGVNESFTLVGQGVEK

SEQ ID NO: 781 - protein, 611 aa, Eucalyptus grandis
MMMFEDMGICGDLDFFSAPLGEGHGVAPQTEPEATVEDDYSDEEIDVDELERRMWRDKMRLKRLKEQNKGKEGVDIAKQRQSQEQARRKKMSRAQDGILKYMLKMMEVCKAQGFVYGIIPEKGKPVTGASDNLREWWKDKVRFDRNGPAAIAKYQADHSVPGKNDGCNPIGPTPHTLQELQDTTLGSLLSALMQHCDPPQRRFPLEKGVPPPWWPTGNEDWWPQLGLPKDQGAPPYKKPHDLKKAWKVGVLTAVIKHMSPDIAKIRKLVRQSKCLQDKMTAKESATWLAIINQEESLARELYPDSCLPLSSSGGSGSLVINDCSEYDVEGMEDEPNYDVQERKPENLNPPSHLGLERMRGPFVQQSPFQMKGEVVSNLDMARKRKPCNDLNMVMDHKIFTCEFLQCPYSELRLGFRDRTSRDNHQLSCPYRSNSSEFGGSNFHVNEVKPVIFPQGFVQSKPMTSTVNSASTPFDLSGLGVPEDGQKVISDLMSIYDTSIQGNKNMNPANDAIIEDQSRPQPKLQQQNEFVGSFFQQPNASANHHMFSREDIQFDRFKTMNSSFEANNHNHDNLQLMFGSPFDLSSFDFKEELPGGVMDPLPKQDVTIWFQQ

SEQ ID NO: 782 - protein, 133 aa, Eucalyptus grandis
MVKRDREDTEVEALALANCLMLLSRVGKSTDSPWLNHKSRPTERMFACKTCNREFSSFQALGGHRASHKKPKLSGDLFHLGRSADSSPAKPKTHECAICGLEFPLGQALGGHMRRHRAAMAESLATAEKPVPV

SEQ ID NO: 783 - protein, 145 aa, Eucalyptus grandis
MVMDISNDDRYLNEEIGGPKDALDDGTQPNNKRKRGRAPKRAMKAEREKLKRDHLNELFDKLGSLLELSEPNNGKASIINETIRLLKDMISQIQSLRKENTTLLSESHYVAAETNELKDENFALEAQIKNVQRELEDKLGHSKPD

SEQ ID NO: 784 - protein, 322 aa, Eucalyptus grandis
ECLPLLDMTQQPPWQELVATDLHGNEWHFRHIFRGQPRRHLLTTGWSVFVSSKKLIAGDAFIFLRGEDGELRVGVRRLMRQQSNMPSSVISSHSMHLGVLATASHAIATGTLFSVFYKPRTSRSEFIVSLNKYLEARAHKLSIGMRFKMKFEGEEVSERRFSGTIIGVGDSMSSGWTNSEWRSLKVQWDEPSSIMRPDRVSSWELEPLVVTAPSNSQQVQRKRARPTVLPSSSVQELSAFGGPKAPEYSSDFLHGDSQRGRDVYLSPKFSPSARSKSLNYNGNGSPAALSGYTVNWPSHMETITDPCTPVNGKESSEKRESG

SEQ ID NO: 785 - protein, 50 aa, Eucalyptus grandis
MASQFNFKGITDASQAEGVAGKSHGNHSLTRQPSIYALTFDEFQNTWGGL

SEQ ID NO: 786 - protein, 152 aa, Eucalyptus grandis
ETSPSSSSLTTTTAPAPAAAAAAATTSSSSYSSAVAVAATTATTSSSSTSSTGSDPALEPSKRSEDCTSQKGPGKSPSPGAHPEEPAGKRHKAGGSGEHPTYRGVRMRNWGKWVSEIREPRKKSRIWLGTYPTAEMAARAHDVAALAIKGSF

SEQ ID NO: 787 - protein, 148 aa, Eucalyptus grandis
MFPRPKVDPASAGTVVIREVWAHNLESEFDLIRDVVDTHPFISMDTEFPGVVFRPPPPPSAGGHYRRLRPSDHYRLLKSNVDALSLIQVGLTFSDPDGNLPDLGCPGGPRYIWEFNFRDFDVARDAHAPDSIELLRRQGIDFERNRAE

SEQ ID NO: 788 - protein, 248 aa, Eucalyptus grandis
KPSERRGGPRGPFRGSGGRRGGFNNGEAGEGERPRRTFERRSGTGRGNEFKRDGAGRGNWGTPTDEIAPEPEEPVVEVEKNVGSEKQLVDEEAADASKENPLNEPEEKEPEDKEMTLEEYEKVREEKRKALLALKAEERKVEVDKELKSMQQLSSKKENHDIFIKLGSEKDKRKEAAEKEERAEKSVSINEFLKPAEGERYYNPGGRGRGRGRGARGGYGGGGGGGYGRDAAAPSIKDPGQFPSLGGK

SEQ ID NO: 789 - protein, 55 aa, Eucalyptus grandis
MSFTGTQVKCKACEKTVYPVEQLSADGVAYHKSCFKCSHCKGTLKVCQFFQLVYN

SEQ ID NO: 790 - protein, 148 aa, Eucalyptus grandis
MIDLNTVEDDETPSSGSSPASSLSSAISASNINSNPAYPTSSSSSSSSCSPLCLELWHACAGPLISLPKRGSLVVYFPQGHLEHVSDFPTSVFDLPSQIFCRVVDVKLHADASTDDVYAQVSLVPEREQIEHKLREGDNEIDLDEDEI

SEQ ID NO: 791 - protein, 106 aa, Eucalyptus grandis
MASHPSNHSCGRPHQGAFADALYKELWHACAGPLVTLPREGERVYYFPQGHMEQLEASTNRGLEQQMPSFDLPSKILCRVVNIQLRAEPETDEVYSQITLLPEPEQ

SEQ ID NO: 792 - protein, 82 aa, Eucalyptus grandis
EQYLNLAYVQQLENSRFRLMQLEQELQRARQQGIFVSSGNPGDLSHNMAAIGNGAMAFDTDYARWLDEHQRLINDLRSGVNF

SEQ ID NO: 793 - protein, 247 aa, Eucalyptus grandis
FFLYIISLFLVRENSERSREGTSSNGDGKSEVQGKVAGEVDAASENVSGGAIERPRATGKLAAPVNSPSMSSSLDLKNSCMDANANPVSILQPGVVPPEAWLQNERELKRERRKQSNRESARRSRLRKQAETEELAKKVDSLSAENRALKSEISQLTENSDKLRLENATLMERLENAQGVEKAVESLGKFNDNGLLSDKTENLLSRVNNSGAVDRRSEDEGEIYERKSNSGAKLHQLLDSKPRTDAV

SEQ ID NO: 794 - protein, 145 aa, Eucalyptus grandis
FSLSPHHLKMEVAPQAEHHQNHHHHHHQYHHQPQQGEPGSYFLSAPPPPPHYSSSGLCYGGGVGDNNNGGYLHSPLSVMPLKSDGSLCIMEALTRSRPQGLGQGSTPKLEDFLGGASATVTATTMPLSLDSLYSYQQSADPEKQS

SEQ ID NO: 795 - protein, 220 aa, Eucalyptus grandis
ETQREKVERERETSIPSQSPQPTILPPTASSPGRSDPPGDATTMVKPSGGGGDRAPPLAPFLSKCYEMVEDEATDPIIAWGSAGDTFVIWDITQFTLQLLPHYFKHSNFSSFMRQLNIYGFRKVDSDRWEFANDGFIRGQKHMLKNIRRRKNVQVVDQKKSLQKQDNSVEEVDKIKIDGLWKEVENLKIDKTVLSLELGKVRQLQETSDNKLVLLRDRVQ

SEQ ID NO: 796 - protein, 212 aa, Eucalyptus grandis
MIGAATNQIPPPPPPPQPQQAAPAAAAIRFPDSVYNALRVGAVFQRLSKHLATIGKGSGLSASCGTSMEFLNSCLCLARGIDYAVANNEVLPKAHELPVLLKRLCLLKDDSFYLSVIMVLMISVKNACKYKWFSEKDCQELLALVDEIGKNFQSPRDAAVGSTASFSRVSSIFARFYPQLKMGYDLISLEVEPGYAALVNDFHISKSMVHSP

SEQ ID NO: 797 - protein, 269 aa, Eucalyptus grandis
MNSTTTQFVSSRRMGMYDPIHQIGMWDENFKQNGNPNAPPALIIPMHANLDNQSEDTSHGSQDTAGKYEQETSKPYDKVQRRLAQNREAARKSRLRKKAYVQQLEASRLKLMQLEQEVDRARQQGVYMASGVDSAYPGYGGCLNSGIVAFEMEYGHWIDEQNRQICELRAALNDHRTDVELRILVESGMNHYLELFRMKAVASKADVFYVMSGMWRTSSERFFLWIGGFRPSELLKVLMPQLDPLSDQQWAFVSNLRQACQQAEDALKQ

SEQ ID NO: 798 - protein, 145 aa, Eucalyptus grandis
INTTPQFLSLRSHPNRHPQSLSFSLFFSVCPVCDKGFPSYQALGGHKASHRKHASSAAAAAGGDDQPTTSSTSAATTSSGVSGKVHECSICHKSFPTGQALGGHKRCHYEAPAPIPASFSAPSAAAAPAASGVSVSEGVGSTHTQ

SEQ ID NO: 799 - protein, 121 aa, Eucalyptus grandis
RHHKIQQLQRARSELARMFSLEGQLEDPVRSGWQLVFVDRENDSLLLGDGPWPEFVNSVWCIKILSPQEVQQMGKQDLELLNSIPVQRHSNGGCDEFTNRQDSRTINSGIPSVGSLDYGTL

SEQ ID NO: 800 - protein, 182 aa, Eucalyptus grandis
TDDTGDKNHRFEGGQLGVAAASDSSDRSKEKATDQKTLRRLAQNREAARKSRLRKKAYVQQLESSRLKLTQLEQELQRARQQGIFISGSGEQSHSMSGNGALAFDVEYARWLEEHNKVVNELRNAVNAHAGDTELRTIVDNVAAHFDEIFKLKGTAAKADVFHILSGMWKTPAERCFMWIGG

SEQ ID NO: 801 - protein, 74 aa, Eucalyptus grandis
MSFTGTQVKCKACEKTVYPVEQLSADGVAYHKSCFKCSHCKGTLKLSSYSSMEGVLYCKPHFEQLFKETGNFNK

SEQ ID NO: 802 - protein, 194 aa, Eucalyptus grandis
KSVFHVFYSPRASHAEFVVPYQKYLKSINNVICIGTRFKMRVDVDDAPEKRCTGVVTRIGDLDPYRWPNSKWRCLMVQWDDDITNGHQDRVSPWEIDPSVSHSPLSIQSSPRLKRPRTSLPTMPPVPGGGVRLLDFEESLRSSKVLQGQEKLHLVSPVYGRDTLNCQVDFEQSPAHQGLASVVSKKRPTISMST

SEQ ID NO: 803 - protein, 282 aa, Eucalyptus grandis
RRANRPQTVMPSSVLSSDSMHIGLLAAAAHAAATNSRFTIFYNPRASPSEFVIPLAKYVKAVYHTRVSVGMRFRMLFETEESSVRRYMGTITGISDLDPVRWQNSHWRSVKVGWDESTAGERQPRVSLWEIEPLTTFPMYPSPFPLRLKRPWPSGLPSFHALRDGDMSISSSLMWLQGVGDQGVQSLNFQGFGMTPWLQPRYDTSMAALQTDVYQAMASAALQDMRAVDPSKCASQSLLPLQQSQNVPMGQASIIQRQMLQQSQSQNSLLQGFQENQAKPKG

SEQ ID NO: 804 - protein, 177 aa, Eucalyptus grandis
DKLREIENSLFGPESDISDSCNCCLNSGSHQFPSTGQWNVNQMIEMIPKLDLKDMLIVCAQAVAEADMPRTAALMEVLERMVSVSGDPIQRLGAYLLEGLRARLESSGSIIYRKLKCKEPTGSELMSYMSILYQICPYWKFAYESANVVIGEAIKYESRIHIIDFQIAQGSQWIPII

SEQ ID NO: 805 - protein, 86 aa, Eucalyptus grandis
MGRSPRCDKDGLNKGAWTAAEDQILMDYVKLHGEGKWSRLSRETGLRRCGKSCRLRWMNYLRPDIKRGNISPDEEELIIRLHKLLG

SEQ ID NO: 806 - protein, 133 aa, Eucalyptus grandis
MRLSSSGFNHQSPEASNAGEKKCLNSELWHACAGPLVSLPPVGSRVVYFPQGHSEQVAASTNKEVDAHIPNYPNLSPQLICQLHNVTMHADVETDEVYAQMTLQPLSPQEQKDLYLLPAELGTPSKQPTNYFC

SEQ ID NO: 807 - protein, 222 aa, Eucalyptus grandis
SPFLSLTTSSSSSPPRRKIRTLGRAANRRNPSPAEVAAAAVHAYLSRRRPAERILLRSGPMSPARSKPIAIRAVFYANLESEFALIRSVVDRFPIISMDTEFPGTVIRPGPAGGGGGRALPPPESNYGLLKANVDRMHMIQIGLTLSDGEGNLPDFGTKCAYIWEFNFRDFDAARDVQNPDSVALLRKQGIDFEMNRQKGADSARFGELLMSSGLVCNDEVS

SEQ ID NO: 808 - protein, 111 aa, Eucalyptus grandis
RGGFNMEKLARGSVQEEHLNAAVALDEGWYCTPRMLHFSFENEFKRDGAGRGNWGTPTDEIAPEPEEPVVEVEKNVGSEKQLVDEEAADASKENPLNEPEEKEPEDKEMTL

SEQ ID NO: 809 - protein, 159 aa, Eucalyptus grandis
QSGLPLDDRPEGARSPSPEPIYDNMGIRINTREYRARERLNKERQDIITQIIKRNPAFKPPADYRPPKLQKKLYIPMKEYPGYNFIGLIIGPRGNTQKRMERETGAKIVIRGKGSVKEGRLQQKRDLKPDPAENEDLHVLVEAETQEALDAAAGMVEKL

SEQ ID NO: 810 - protein, 387 aa, Eucalyptus grandis
MCGGAIISDFIPNQRARRLTSDFLWPDLKRSAGKQSRRPARSEVVDVVDDDFEADFQGFKDESDVEDDFDDEVEVDVKPFAFSAAEPRYSKGSSTTKSVEYNGQAEKSAKRKRKNQYRGIRQRPWGKWAAEIRDPRKGVRVWLGTFNTAEEAARAYDAEARRIRGKKAKVNFPDDSSSASSKRSVKSNVQKLPKTTTNNVQPNLNQNFNYANSSDDDIYSSMGFVEEKPPTNQFYMDALNAQGVSGMNSLSPADNAPLYFNSDQGSNSFECSDFGWGENAPRTPDVSSVLSATLEVDESQFEDANPRKKIRSASDDVSEEENTAAKTFSEELSAFESDMKFFQMPFVDGGWDPSVEALLGGEATQDGGNAVDLWSFDDLAPMMGGVF

SEQ ID NO: 811 - protein, 219 aa, Eucalyptus grandis
HGGAAGFLGPRAVPMKQAGLAQKPTKLYRGVRQRHWGKWVAEIRLPKNRTRLWLGTFDTAEEAALAYDKAAYRLRGDFARLNFPHLKHKGSHIQGDFGDYKPLHSSVDAKLQAICQDMAEKPADGKKRRSAPAGGGSSAAAASPRRPEPEPEPVKTEVGVSAATSSSPESDDASVEESSPLSELTFNDFVEPQWESVGVPENFSLQKYPSEIDWAAIYS

SEQ ID NO: 812 - protein, 75 aa, Eucalyptus grandis
MKERQRWRAEEDALLRAYVKQYGPREWHLVSQRMNTPLNRDAKSCLERWKNYLKPGIKKGSLSEEEQRLVFHLLP

SEQ ID NO: 813 - protein, 235 aa, Eucalyptus grandis
VVLPSSGMVKSSGGAGDSDHSDLEASVVKEADSSRVVEPEKRPRKRGRKPANGREEPLNHVEAERQRREKLNQRFYALRAVVPNVSKMDKASLLGDAIAYIKELNSKLQTTESDKENLQKQMESLKKELTNKDSRSALPQSDKDLSISSNHGAKLIELDVDVKIIGWDVMIRIQSSKKNHPAAKLMQALMELDLDVHHASVSVVNDLMIQQATVKMSGRFYSQEQLRLALSSKIG

SEQ ID NO: 814 - protein, 111 aa, Eucalyptus grandis
ELKPDKIGLQRSEQLRDLYESLLEGETDAQNKRPSAALSPEDLTDEEWYYLVCMSFVFNPGEGLPGRALADGQTIWLCNAQYADSKVFSRSLLAKSASIQTVVCFPYLGGV

SEQ ID NO: 815 - protein, 107 aa, Eucalyptus grandis
MESERYDETTEKQRIRRRPHQKPYRGIRMRKWGKWVAEIREPNKRSRIWLGSYATAVAAARAYDTAVFYLRGPSARLNFPDLILHEGQDSLGEVSAASIRRRAAEVG

SEQ ID NO: 816 - protein, 89 aa, Eucalyptus grandis
MAFTGTVDKCKVCDKTVHVVDMMTLEGIPYHKTCFRCSHCNGTLVMSNYSSMDGVLYCKTHFEQLFKESGDFRKNFHSAKSDKPNEMTR

SEQ ID NO: 817 - protein, 96 aa, Eucalyptus grandis
MESERYDETTEGQRIKRRPHQQQQQQQQRRQKPYRGIRMRKWGKWVAEIREPNKRSRIWLGSYATPVAAARAYDTAVFYLRGPSARLNFPDLIWRE

SEQ ID NO: 818 - protein, 159 aa, Eucalyptus grandis
MVKRDREDAEVEALAVANCLMLLPRVGESAVSNRESRSTERMFACKTCNREFSSFQALGGHRTSHKKQKLIPGGLFHLGCTADSSPAKPKRHECSICGLEFPMGQALGGHMRRHRAAMAEGLAAEAAKPVPVLKRSNSKRVMCLDLNSSLMEDDLTLRL

SEQ ID NO: 819 - protein, 241 aa, Eucalyptus grandis
EDSLDKEPPPPPPPRFKVHSFCKTLTASDTSTHGGFSVLRRHADECLPQLDMSKQPPTQELAAKDLHGNEWRFRHIFRGQPRRHLLQSGWSVFVSSKRLVAGDAFIFLRGENGELRVGVRRAMKQQGNVSPSVISSHSMHLGVLATAWHAISTGTMFTVYYKPRISPAEFIIPYDQYMESLKKNYSIGMRFKMRFEGEEAPEQRFTGTIIGIEDADPKGWRDTKWRSLKVRWDENSAIPRP

SEQ ID NO: 820 - protein, 185 aa, Eucalyptus grandis
FRGVRKRKWGRWVSEIRLPNSRERIWLGSYDTPEKAARAFDAAAFCLGRPAAKLNFPGSPPEISGAASLSPDEIQSAAASHANFGAVAVPARAELPRPGSPAPSPSLSASEASSVLTTESDLTLDLSFLDFLDDSGPVSGEPHIGKFPGVEEAPDVFYHMQFPSVESAGLNLDTLLASDSFPWRI

SEQ ID NO: 821 - protein, 187 aa, Eucalyptus grandis
EADFLAKHSKPEIVDMLRKHTYRDELEQSKRSYRGSAAERAGRGGFGPGRTEWSAAAREQLFEKAVTPSDVGKLNRLVIPKQHAEKHFPLPGGPAATMKGVLLNFEDVGGKVWRFRYSYWNSSQSYVLTKGWSRFVKEKSLKAGDTVCFQRSTGPDKQLYIDFKPRGQPPAGPAAPPPPPVQMVRLF

SEQ ID NO: 822 - protein, 110 aa, Eucalyptus grandis
VNPPTRTFVKVHKSGTFGRSLDISKFSSYDELRSELARMFGLEGQLEDPQRSGWQLVFVDRENDILLLGDDPWQEFVNNVWYIKILSPHEVKQLGKQGINPANSVPRQAL

SEQ ID NO: 823 - protein, 370 aa, Eucalyptus grandis
MTRRCSHCCNKGHNSRTCPVRGGGGDGGGAAAAPSSSSPSTSSSGAAAAAAASASGGGVKLFGVRLTDGSIMKKSASVGCLSAAHYHSSSSAAASPNPGSSPIDGSDGYLSDDPAPGSRSSNRRVERKKGNPWTEEEHRRFLIGLQKLGKGDWRGIARDFVTTRTPTQVASHAQKYYIRQSNAGRRKRRSSLFDMAPDMATADQPSHPEETFLPPLVRLNDDTNSTTSTSMGLDLERTPMETSHPETSEGGGDVAMESIDQVPLVPCYFPYYLPLPFPMWPPNMAPPEDGRVVETSHHRVLKPIPVIPKEPLNIDQIVGMSQLSLAENEPAPLSLKFLGETSRQSAFIKAPSSVNESDLDNCKDGATQAA

SEQ ID NO: 824 - protein, 160 aa, Eucalyptus grandis
ELWLSFGTGEKKSINSELWHACAGPLVSLPPVGSLVVYFPQGHSEQVAASMQKETTCVPSYPNLPAKLICMLHNVTLHADLETDEVYAQMTLQPVSKYDQEALLASDMGLKQSRQPTEFFCKTLTASDTSTHGGFSVPRRAAEKIFPSLDFTMQPPCQEL

SEQ ID NO: 825 - protein, 129 aa, Eucalyptus grandis
MALEALNSPTAAAPFGHDDADGHPWAKRKRSKRPRADPQDQPSEEEYLALCLIMLARRRRRPGSSGRLHECSICHKAFPTGQALGGHKRCHYDGGSSSSAARAASSSEAGGPSHTTVSHREPIDLNLPA

SEQ ID NO: 826 - protein, 115 aa, Eucalyptus grandis
RHLLQSGWSLFVSSKKLVAGDAFIYLRGENGELRVGVRRAMRQLNNVPSSIMPSHSMHIGVLATAWHAISTGTMFTVYYKPRTSPAEFIIPFDKHIESAKFDYSIGMRFRMTFEW

SEQ ID NO: 827 - protein, 199 aa, Eucalyptus grandis
SSVHDISENGEADEQQKHSEQHESSPATGVPHPGVSLPNVQYATPPQLGAGHAMTPPAYPYPDPYYRSIFAPYDAQSYPQQPYGAQPMVHLQLMGIQQAGVPLPSDAVEEPVFVNAKQYHGILRRRQSRAKAELENKALKSRKPYLHESRHLHALRRARGCGGRFLNAKKDENQQSEVSSADKSQGNINLNSDKSDRSS

SEQ ID NO: 828 - protein, 98 aa, Eucalyptus grandis
VKDMFQDQREKYDTFLEVMKDFKAQRTDTTGVIARVKELFKGHNKLILGFNTFLPKGFEISPDEDETPIKKNVEFEEAISFVNKIKKRFQNDEHVYKS

SEQ ID NO: 829 - protein, 136 aa, Eucalyptus grandis
MFRQHNLLLNFNPTDDDPQDEGSPPPPYVLRGAPPPAEPSPAEKEPMFEKPLTPSDVGKLNRLVIPKQHAEKHFPLVGEATQQLSFEDESGKWWRFRYSYWSSSQSYVLTKGWSRFVKDKRLDAGDVVLFTATAPT

SEQ ID NO: 830 - protein, 96 aa, Eucalyptus grandis
MAQRSAPAPFLTKTYQLVDDPATDDVISWGESGRTFVVWKTAEFAKDLLPSSFKHNNFSSFVRQLNTYGFRKIVPDKWEFANDRFQRGQKELLSEI

SEQ ID NO: 831 - protein, 81 aa, Eucalyptus grandis
RMWRDKMRLKRLKEQNKGKEGVDIAKQRQSQEQARRKKMSRAQDGILKYMLKMMVAHWKRGLVAPAGFAEGSRSPALQETS

SEQ ID NO: 832 - protein, 94 aa, Eucalyptus grandis
MDQWRTDLGASTSVHPQQHQHQHQHHPSSRLHASHDEPRQREEADVRDPVAARKVQKADREKLRRDRLNEHFLELGSTLDPDRPKNDKATILTD

SEQ ID NO: 833 - protein, 245 aa, Eucalyptus grandis
KKTISSEHKRRRVVVVVLLLLVPSTSFFPPPSSSLPPSLSLNLPNPSRRRRRERERERERREDHRFRPSRARAVMRRGRCAAAAAKREAAEIAPPPVPHAAAAAAAEPRYRGVRRKSLGRYTAEIRDPGTKKLVRLGTFGSPEEAARAFDAKAVAFRGVKARTNFPVAPSSFPPAASRDLRAPLIESRKFGRRGARDLRGDHHDVSPQRPTSSSLSSTVVSSSGPRPSPSPETAKRRTRTPPRHR

SEQ ID NO: 834 - protein, 180 aa, Eucalyptus grandis
YNSNSDPIREEFMKALEPFMKSVSPVSSPLSSLSSCDSVFPKQQPNLNPDLCSSWIVNPMGLEQSGSIGLNRLSHSQIQHIQDEMLLRRQNQELWLASAVKSPLQHEKFDQCRYQNHHGSPHLLRPKALSMKRVGVPPKPNKLYRGVRQRHWGKWVAEIRLPKNRTRLWLGTFDTAEEAA

SEQ ID NO: 835 - protein, 234 aa, Eucalyptus grandis
RERERGRGVMDLFFHEEVQSDIFWCDQLVEPPPPPPPPLPPANPSAFSPYTNRLPSQDRGFMPNPGNNMNKRVMEFLRRSWAEPSQIQEFDRERGFRHMLSERMRREKQKRSYSALLSELPHGTKNDKNSIVQTACMRIKELVKYKQELERQNGELKSGLNEKSGGDKAEGTKIRVKIANPTSGIDSMLEVLKCLDNMGLKATAIQTQCSADQLFAVIEVENEVCAQQSDANVH

SEQ ID NO: 836 - protein, 59 aa, Eucalyptus grandis
HGATWRRKEANGGSEASDAVLPRAHHRHRYKGVRMRKWGKWVAEIRQPNSRDRIWLGSY

SEQ ID NO: 837 - protein, 38 aa, Eucalyptus grandis
ELLQIQRKRKRMESNRESAKRSRLRKQQHLDELTTEVG

SEQ ID NO: 838 - protein, 167 aa, Eucalyptus grandis
MAPREKPSVAAIPNPNGAKEIRFRGVRKRPWGRYAAEIRDPGKKTRVWLGTFDTAEEAARAYDTAAREFRGAKAKTNFPTSAELISSSRSPSQSSSLDEPSPPPPAGAVQAAALGPPLDLSLGRHPVAAAAAGPGPYFPGAAAMCFPVMPPPPRPVFFFDPFGRMEH

SEQ ID NO: 839 - protein, 84 aa, Eucalyptus grandis
CLGLSSVAANAEKLAALQNEYHFAKARIDEDHEKAQRLEKKVKTLTFGYQMREKTLRDQIESTFKQLDTAGTELECFPALQKQE

SEQ ID NO: 840 - protein, 157 aa, Eucalyptus grandis
PSSPVSTKTHPPYLCTRPTRLSQGLRYRRLAAKHEEKPSAVLDKSQDPTDSAKPSKKPRHRHSPTQLAALNELFEKSEHPTLEERGQLAEKLGMETKTVNAWFQNKRASTKKRNKGGTSEPHPATSQNDLSEDALKTPSALPSIANLLNDAPSSASP

SEQ ID NO: 841 - protein, 86 aa, Eucalyptus grandis
YLHNPMRKRQRTLDMHAGAPGPNDAIDANSVGDNAFIADHDAIDSAGDDDDDEDKPKTGQKQGRRKIKIEFIQDKSRRHITFSKRK

SEQ ID NO: 842 - protein, 201 aa, Eucalyptus grandis
DHVPSSSALDSRSSSNRTSGVTLAEVLPTPGQSKSSADSGFCVSHLGGVPDSQSSSYAAEHVNTHQTQEIHLPVPQDNADLPDANFLVSETASPDYLETLSAALDGTMDVESDAFSSERDAGIMLDDVTNLPAISDVFWEQFLAASPLTADTEEISSTSHETGITNDQESHTKVENGFEKAHYMDHLTKQMGHLTSNNGTG

SEQ ID NO: 843 - protein, 187 aa, Eucalyptus grandis
FSTPPPHPESNPIPSLPPSLFFPQSFVAFSSTHAPQSPTPSIKLKHHHLKKKEGKKERRTGDPTEGRARTRHGTIPLLREGAHQQGRVDQGRGPAPHRLHPPPRRRLLALPPQICRASQVRQELQAQVDKLPPPRPQRGNFTEEEDELIIKLHSLLGNKWSLIAGRLPGRTDNEIKNYWNTHIKRKA

SEQ ID NO: 844 - protein, 112 aa, Eucalyptus grandis
MEMKGGVVPKEEEASSDVGQPPPPPPPPPQPMEGLGEAEAAPFLTKTFEIVEDPATDPIVSWSEGRNSFIVWDAHQFAVTLLPKHFKHGNFSSFIRQLNTYGVFDEYDTASF

SEQ ID NO: 845 - protein, 76 aa, Eucalyptus grandis
MTGNFGWGSNSMEEAWRKGPWTAEEDKLLIEYVKLHGEGRWNSVARLTGLKRNGKSCRLRWVNYLRPDLKRGQITP

SEQ ID NO: 846 - protein, 142 aa, Eucalyptus grandis
MNSNASSNPQSMATSTTSATTPAAGGDGGKKVRKPYTITKSRESWTEEEHDKFLEALQLFDRDWKKIEDFVGSKTVIQIRSHAQKYFLKVQKNGAVAHVPPPRPKRKAAHPYPQKASKNVLVPLQASMAQPSSTNPAFTITP

SEQ ID NO: 847 - protein, 84 aa, Eucalyptus grandis
MKMAERSNSSDPETSPSNSPSTSSSSSSYSPDPRRRAGSPAAARDPLRSSKRSKHPVYRGVRMRNWGKWVSEIREPRKKSRIWL

SEQ ID NO: 848 - protein, 60 aa, Eucalyptus grandis
KWRSRFRMAGFQQFPLSSAVTDAVRNLLREYNENYRIEEKDGALYLWWRNRAMATSSAWW

SEQ ID NO: 849 - protein, 90 aa, Eucalyptus grandis
GVGFPDPGPDNGQVLDARDPLAEKKLELATCQRRVEEEMLKHSKAVEVTRTSTLNNLQTGLPGVFQALASFSSLFMEVLDTVCTRSYAIK

SEQ ID NO: 850 - protein, 52 aa, Eucalyptus grandis
MAAPPAEQSGSASGGESQRSVPTPFLTKTYQLVDDPAIDAVISWNGDGSSFI

SEQ ID NO: 851 - protein, 52 aa, Eucalyptus grandis
MDPMDIVGKSKEDASLPKATMTKIIKEMLPPDVRVARDAQDLLIECCVEFIN

SEQ ID NO: 852 - protein, 121 aa, Eucalyptus grandis
MNSPLAQLVNPRRMHTYEPFDQFPMWGDTFKADKVKNLEASSSVIVHAVDDGLDKKFEYVSHESAENSSSRSDQEANRPDKVQRRLAQNREAARKSRLRKKKYVQQLESSRLKLAQLELEL

SEQ ID NO: 853 - protein, 293 aa, Eucalyptus grandis
FVYGIIPEKGKPVSGASDNLRAWWKEKVRFDRNGPAAIAKYRADHSIPGNGEDAATIGPIPHTLQELQDTTLGSLLSALMQHCNPPQRRFPLEKGVAPPWWPTGEEEWWPQLGLPADQGPPPYKKPHDLKKAWKVSVLTAVIKHMSPDISKIRKLVRQSKCLQDKMTAKESATWLAIINQEEALSRKLYPNSFPPVCSDSGFGSYVISDASDYDVEGADDEPKFEAEECKPFDPSAFGIGPRVSTGELLIHPLVSQIKGEVNETKTNSRLVSKRNQPSDEPKAKMDQKIYTCE

SEQ ID NO: 854 - protein, 150 aa, Eucalyptus grandis
STSSQRADKSLIMEHEFSSAKIKALLEILQSQCRGESANAELHGPMGCDDESLFENTGTGDSTYRVKAVKHTTVYSSSPPEGPIKAIVFSQWTSMLNLVEQNLIHFGINYRRLDGTMTLSARDKAVKDFNTDPEIVVMLMSLKAGNLGLN

SEQ ID NO: 855 - protein, 92 aa, Eucalyptus grandis
SEFGGELMNPRSNWLIVYNDDEGDMMLVGDDPWQEFCGIVRKIFIYTREEVQKMKPGTISAKDEDNLMVDEGVFSKKMTSDTLPSASDPKNC

SEQ ID NO: 856 - protein, 74 aa, Eucalyptus grandis
IEALKKRLDDVNAKYAVSVEFTKAMALNHLKNGLPRVFKALMEFSGACTKVFEALNNPREQVGSRENEPRVLPA

SEQ ID NO: 857 - protein, 125 aa, Eucalyptus grandis
QILPPNAKISKEAKETMQECVSEFISFVTGEASDKCHKEKRKTVNGDDIVWALGSLGFDDYAEPLKRYLNRYREVEGERASQNKVTGGESRNEKNLYGDESPEKQLGAASSSPLKFFDVADRSTN

SEQ ID NO: 858 - protein, 113 aa, Eucalyptus grandis
VNSVFELHKLLARPGAIEKVLGVVRQVRPAIVTVVEQEANHNGPVFVDRFNESLHYYSTLFDSLEGCASTQDKAMSEVYLGKQICNVVACEGADRVERHETLAQWRVRLGGAG

SEQ ID NO: 859 - protein, 114 aa, Eucalyptus grandis
SLFNTSKSNKHLWEQISSKMREKGFDRSPTMCTDKWRNLLKEYKKAKYQDRGSAKMSYYKEIEEILRERSKNNQYKSPTASALKVDPYMQFSDKGIEDAGMTFGPVEASGRPTL

SEQ ID NO: 860 - protein, 181 aa, Eucalyptus grandis
DLELKVRELETVMLGPSSDMPHTVDINFLVGSGQMSQETETLMEIISRRDLKEILCACAKAVEDNDTLKFECLISELRPMVSVSGDPIQRLSAYMLEGLIARLASSGSSIYKALKCKEPAGAELLSYMHILYDICPYFKFGYMSANGSIAEVMKDENIIHIIDFQIAQGGQWITLIQALAA

SEQ ID NO: 861 - protein, 58 aa, Eucalyptus grandis
MARSSCNQKLRKGLWSPEEDEKLFNYISRHGLGCWSSVPKLAGLQRCGKSCRLRWINY

SEQ ID NO: 862 - protein, 86 aa, Eucalyptus grandis
MASGMENRGEIPANLKKQLALAVRKIQWSYGIFWSISTRQPGVLEWGDGYYNGDIKTRKTIQAVELNTDQIGMQRSEQLRELYESL

SEQ ID NO: 863 - protein, 182 aa, Eucalyptus grandis
NIQRNEYHNLFNFISGKGLKIMNLGEQGADGVPGVLDVDDDDAVDPHLERIRIEAGVDESDEEDEDFVIDKDDGGSPTDDSGDDESDVSESGDEKEKEKYGKKESRKEVKASSSKKKAKAGDEEGSKKKKQKKKDPNAPKKAMSGYNFFLQTESEKMKRTNPGLSFGDVSREIADKWRGLSA

SEQ ID NO: 864 - protein, 55 aa, Eucalyptus grandis
MSFTGTQVKCKACEKTVYPVEQLSADGVAYHKYCFKCSHCKGTLKLSSYSSMEGV

SEQ ID NO: 865 - protein, 151 aa, Eucalyptus grandis
DKSSSPVPPQDQTGVHVYHPDWAAMHAYYGPRVALPPYYNSAVSSGHGPHPYMWGPPQPMMPPYGPPYAAIYSHGGVYGHPAIPLTPTPLAAETPKKSSANSDNGLVKKLKSFEGLAMSIGSGGDADSADDGTDKRSSQSADSGDSSDEDQ

SEQ ID NO: 866 - protein, 203 aa, Eucalyptus grandis
RFKQLLEEASQDIDHTTDYYTFRKKWGNDPRFEALDRKDRENLLNERVLPLKKAAEERAQAMRAAATSSFKSLLRDRGDITVNSRWSRVKDSLRDDPRYKSVKHEDREALFNEYIAELKAVEDREEKEAKAKREEQEKLKERERELRKRKEREEQEMERVRVKIRRKEAIASFQALLVETIKDPQLPGQSQKLNLTKILRTCE

SEQ ID NO: 867 - protein, 113 aa, Eucalyptus grandis
EIKNYWNTRIKRLQRTGMPIYPTEVCLQVSSENQETHNMGNLHTAGEDNCDLSQADPLEIPEVDFRKLELHLGFSSFWSTLLDVPPCGFGREAMCLSDAYCLPFPSSRSPKRL

SEQ ID NO: 868 - protein, 107 aa, Eucalyptus grandis
TTRIPAANLEDLFDNHNMARIRDVWAPNLEIEMQNIREAIEKYSYVSMDTEFLSGARPIGNFKTSSDYHYQTMRCNVDLLKIIQVGITLADEEGLFPQDCSTWQVQL

SEQ ID NO: 869 - protein, 85 aa, Eucalyptus grandis
MGRSPCCEGNGLKKGPWSSEEDKKLLDFIQQHGHGSWISLPKRAGLNRCGKSCRLRWINYLWPDIKRGSFSPEEEQTILHLHSVL

SEQ ID NO: 870 - protein, 85 aa, Eucalyptus grandis
MPWKTGLTGSKTEEDKALQLCRERKKSVRQAVDGWGSLVYAHFMFVQSLRNVGTALTKFFETESPNGSPSYASMSTTPEPIALTE

SEQ ID NO: 871 - protein, 104 aa, Eucalyptus grandis
GLLRCSKSCRLRWTNYLRPGIKRGSFTDQEEKMIVHLQALLGNRGAAIASYLPQRTDNDIKNYWNTHLKKKLKKLQGQANPDDDDHNHHPQGFNATSHSNPKGQ

SEQ ID NO: 872 - protein, 102 aa, Eucalyptus grandis
MARTPCCEKMGMKKGPWTPEEDQILISHIHQFGHSNWRALPRQAGLLRCGKSCRLRWINYLRPDVKRGNFTDDERDTIIELHQVLGNRWSAIASRLPGRTDN

SEQ ID NO: 873 - protein, 125 aa, Eucalyptus grandis
WTAEEDKKLINFILTHGQCCWRAVPKLAGLLRCGKSCRLRWTNYLRPDLKRGLLSEYEEKMVIDLHAQLGNRWSKIASHLPGRTDNEIKNHWNTHIKKKLKKMGIDPLTHKPLVTNNDNTTDQQP

SEQ ID NO: 874 - protein, 114 aa, Eucalyptus grandis
MDKKPDDDSGKSQDVEVRKGPWTMEEDLILINYIANHGEGSWNSLAKAAGLKRTGKSCRLRWLNYLRPDVRRGNITTEEQLLIMELHAKWGNRDAHKSHNFSLHRFYNIIPIDH

SEQ ID NO: 875 - protein, 127 aa, Eucalyptus grandis
NGDSVKDDLDTDEYETHATVLDKLLAWEKKLYEEVKQGEHMKLEYQKKVALLNKQKKRGASGESLEKTKAAVSHLHTTYIVDMQSMDSTASEINHIRDKQLYPKLAQLVDGMANMWEKMRMHHDKQE

SEQ ID NO: 876 - protein, 153 aa, Eucalyptus grandis
PETVHVQNYSPIHQMGIDGFFPAHPSPQNPSYHSYSPNNRPNFPPPSPQTSQWDYFWNPFSSLDYYGYPTRSSIDHMAMDDETRGLRQVREEEGIPDLEEETEHEECDHHSYVDEDRGNRDANFPTEEVLVEDVDDEEEDEDEGNRHSCESED

SEQ ID NO: 877 - protein, 62 aa, Eucalyptus grandis
VLRAQLMELTDRLRSLNSVLQVVEVVSGLAIDIPEIPDPLMNPWQLPCPMQPITASADMLQL

SEQ ID NO: 878 - protein, 135 aa, Eucalyptus grandis
LTLTAASTVIFAELSWTPGDLIQAEDRAHRIGQVSSVNIYYLLANDTVDDIIWDVVQSKLENLGQVLDGHENTLEVSASQPTRNSPAKQKTFNSPGKQHTFNSPGKQQKFNSPGKQTTLDSFMKRCNSGDPSEHQ

SEQ ID NO: 879 - protein, 138 aa, Eucalyptus grandis
MALEAINSPTAASAPFQFMEEPLSSRFLEPLNKRKRSKRPHHPPSEDEYLALCLIMLARSGAAPKPNHHASPAPLPPPPPPAPTKPEEAAATATATAAPANNLSYKCAVCGKGFPSYQALGGHKASHRKSAAAAAAAA

SEQ ID NO: 880 - protein, 124 aa, Eucalyptus grandis
AIALVLAKREIIRSIGTGLDWSSPSAGSSTSLPEIKGTLVICPVVAVTQWVGEINCSTAQGSTKVLVYHGANRGKTADQFKNFDFVVTTYSLVEGEYRKFVMPPKKKCIYCGKLLYKEKMTVHL

SEQ ID NO: 881 - protein, 196 aa, Eucalyptus grandis
PDLPGDDLALEFEEFDFQSLFDELSPDAAGLLDASDVDASSPGSLSSWIGEIEGMLMKDDEEAVAVEPSQEVFDRFFAGLLVDSPEGGPAEATDGASDKESNSSDGGGGGGGERDEKLVVGDNELSEDADDDDPVSKKQRRQLRNKDAAARSRERKRSYVKELEMKSKYMEGECRRLGRLLQCFVAENQALRLNLE

SEQ ID NO: 882 - protein, 102 aa, Eucalyptus grandis
VISSQSMHLGVLATASHAVTTQTLFVVYYKPRTSQFIISLNKYLEALNNKFTVGMRFKMRFEGEDSPERRFSGTIVGVEDFSPQWDNSSWRSLKVHWDEHAS

SEQ ID NO: 883 - protein, 69 aa, Eucalyptus grandis
FNQLDPRINRKPFSEEEEERLLTAHKLCGNKWAMIARLFPGRTDNAVKNHWHVIVARKQREQSNNARGR

SEQ ID NO: 884 - protein, 74 aa, Eucalyptus grandis
QKYFIRQSNVSKRKRRSSLFDIVAEESVDVPMGSRDFFAVDEQQQETEVNDALQQLPPDVDEECESMDSTNSNT

SEQ ID NO: 885 - protein, 61 aa, Eucalyptus grandis
SSSSRHESRHPIPLLTNGQPMSGEIPCASIDSPSVRTTSGPLGPFDKHVHSLPYVDPRQPV

SEQ ID NO: 886 - protein, 142 aa, Eucalyptus grandis
SPPLSAHVASHKGLHQASKPKIHECNICGSEFASGQALGGHMRRHRSAPPPTATSADATSPTNPPAAAAITTEKSRNILSLDLNLPAPNGGGSPPPSAPPPGELEVPIRHKSTAHHTSLARLGGLPLLKKKEKTGSHVNQCN

SEQ ID NO: 887 - protein, 139 aa, Eucalyptus grandis
AVSDINLVSNSTHSSYEDGGSPRRITSESDPKDAPMGTESLLSAPEAVELSDTGTSFTFKMDSSMQRKPPVDESPRMHPLPMNLTTEEGDNNVSCQLNLSLASSLLQVDHSQQFNRLNVLGSETSKSPDARSNASITES

SEQ ID NO: 888 - protein, 36 aa, Eucalyptus grandis
HPEYNSSPVGYMETNKARLVLEKDDLGLNLMPPSTC

SEQ ID NO: 889 - protein, 176 aa, Eucalyptus grandis
NIGAKADVFHILSGMWKTPAERCFMWLGGFRSSELLKILGNHLEPLTDQQLMGICNLQQSSQQAEDALSQGMEALQQSLVDTLSSTTLSPTGSGNVAEYMGQMAIAMGKLATLENFVHQADLLRQQTLQQMHRILTTRQAARALLVINDYISRLRALSSLWLARPRTENICSAKLF

SEQ ID NO: 890 - protein, 33 aa, Eucalyptus grandis
KKRLMVASAFGEDEKAGRQTRLTVEDLNYLFMA

SEQ ID NO: 891 - protein, 51 aa, Eucalyptus grandis
MRDLCLDQREMASGSSRVEARADAEMALYNELWQACAGPLVAVPRQGERVF

SEQ ID NO: 892 - protein, 77 aa, Eucalyptus grandis
MLSPSGSSPLAQSTGRHPLYRGVRSRSGKWVSEIREPRKTTRIWLGTYPNPEMAAAAFDVAALALKGSDAALNFPHD

SEQ ID NO: 893 - protein, 95 aa, Eucalyptus grandis
FPQGHMEQLEASTNQELNQRIPLFNLTSKILCQVVNVQLLAEQETDEVYAQITLIPAGNLMEPTSPDPVSAETPRTRVHSFCKVLTASDTSTHGG

SEQ ID NO: 894 - protein, 79 aa, Eucalyptus grandis
MGSNINFKNFSTDPTPTNNRPPGNTLLTRQPSVYTLTFEEFQNSIGKDFGSMNMDELIKNIWSAEENQSMASASGACGG

SEQ ID NO: 895 - protein, 57 aa, Eucalyptus grandis
MQACGSYEYSEQYHDEVKPAYGPQISAHSQYLGYNSLRLGLPLRVAEEPVYVNAKQY

SEQ ID NO: 896 - protein, 167 aa, Eucalyptus grandis
PDVPLPSPAGDVTDAEWFYVMSLTRSFSAGDGIPGKALSTGSLVWLTGARELESYKCDRAKEAELHGIRTMVCIPTGDGVLELGSCDVIPENWGLVQRAKSLFGSDLLLPKHPPPPPPPFQLHHDHSDISFADIGIIAGVQENDFAPHDDHEKKVKKKQPLVEGAGG

SEQ ID NO: 897 - protein, 125 aa, Eucalyptus grandis
VAGMTRGRRDGILKSEKTRHVVKIGPMHLKGVWIPYERALEFANREKITEYLYPLFVHDIGALLYHPSNPSGATSRAGNAQNTLAAIDRRRNEARMAASIQGQAVSGVLVSPVAQTAGGRPSVDR

SEQ ID NO: 898 - protein, 120 aa, Eucalyptus grandis
NNLSLYDNGVGSTPRPRSNAEQLIFRAALQDLSQPKSEETPPDGALAVPLLRHQKIALSWMVKKETAINCCGGILADDQGLGKTVSTIALILKERPPTFKQCQENPKQELQTFDLDEDEN

SEQ ID NO: 899 - protein, 58 aa, Eucalyptus grandis
MSLSAKSESIQIRDVWDDNLDEEFARIREIVDDYPYVAMDTEFPGIVVRPVGNFKNSS

SEQ ID NO: 900 - protein, 94 aa, Eucalyptus grandis
MADSDNDSGGHNNANSESAAALAREQDRFLPIANVSRIMKKALPANAKISKEAKETVQECVSEFISFITGEASDGSSSIGGGGGGVVNSGGGSA

SEQ ID NO: 901 - protein, 169 aa, Eucalyptus grandis
KINPDRWEFVNQGFQKGNKHLLKNIKRRCKFSEHRKTSSSTVTSDYQKAENEVELNTLKKGQEVLKTRSLKLREERKSFQHEIEQVAERVRHAECRNQQIFLFLTKAAKSPNFVHHLIQKKSQKRDLETCESSKKSKLLGSDAEATKFLNEAMDHMIKSPNVDCLRISD

SEQ ID NO: 902 - protein, 266 aa, Eucalyptus grandis
GILAAAAHAAANNSPFTIFYNPRASPSEFVIPLAKYNKAFYTQVSLGMRFRMMFETEESGVRRYMGTITGISDLDSVRWKNSQWRNLQVGWDESTAGERPSRVSMWEIEPVVTPFYICPPPFFRPKFPRQPDDESDVENAFKRAMPWLGDEFGIKDTPNSIFPGLSLMQWMSMQQSNPLQATQSGLLPPMLSSTGLHNNLGIDDPSKLLSFQAPTQGLQFNKTNPQNQVSQLLQPSMAWSQQHQLQQLLQNPLGHQQQQQQQQLQR

SEQ ID NO: 903 - protein, 101 aa, Eucalyptus grandis
VPSMKPEYPVPNGIGASDFGESFRFQKVLQGQENLGFGTPYDGIETQSHRLSEVRRHHPDDSGGSEAAATRNGITNPSVNASVTYKGMGFGESFRFREVLQ

SEQ ID NO: 904 - protein, 142 aa, Eucalyptus grandis
PPSPLLPPPSIPKTLLRIDSGSPLRPPPPPAAMDAAPPGGGGGGGGPAPFLLKTYEMVDDAGTDEIVAWSSGKTSFVVWNPPEFARLLLPTYFKHNNFSSFIRQLNTYGFRKIDPERWEFANEEFVKDKKHLLKNIHRRKPI

SEQ ID NO: 905 - protein, 80 aa, Eucalyptus grandis
MYVLEGVTPCIQSMQLQAGDTVTFSRMDPEAKLIMGFRKASTSMMQDSQLAAVSNGNHSSEALISGGFENVPMISGYSSL

SEQ ID NO: 906 - protein, 30 aa, Eucalyptus grandis
RTGKAESECLCPRNSGLLDALVHESKTMSS

SEQ ID NO: 907 - protein, 69 aa, Eucalyptus grandis
MNQVADRQIPFYNLPSKILCRVINVQLRAEPETDELFAQVTLLPVPNQDETAVEKETGIPCLQRPRVHS

SEQ ID NO: 908 - protein, 60 aa, Eucalyptus grandis
TFMGICSLQHSSQQAEEALSQGLEQLQQSLVDTIAGGPSIEGMQQMAIALGKLTNLEGFV

SEQ ID NO: 909 - protein, 139 aa, Eucalyptus grandis
IGYPKMPLQASISTQSDFQADGSGHGVPIPQGADSGSLGISALPTIQRDSGVHVKQTTSESSREDSDDEEFEGDTGTTENKDPAEVRRARRMQSNRESARRSRRRKQEHMSELENQVEHTGLLKRLTDMNQKYDVASVD

SEQ ID NO: 910 - protein, 153 aa, Eucalyptus grandis
GTGGNWIALPRKAGLKRCGKSCRLRWLNYLRPDIKHGGFTEEEDHVICTLFFTIGSRWSVIASKLPGRTDNDVKNYWNTKLKKKLMKQLASLKTVPESNFDYQVCAQNSASIDPETKNREYAANSMGFPKQNFNPGIPTSNSSLLCPPSLTEV

SEQ ID NO: 911 - protein, 118 aa, Eucalyptus grandis
TSCADNCRLSLSLIQAPVFSSILSKKLLCFFSLSLSTMARPQQRYRGVRQRHWGSWVSEIRHPLLKTRIWLGTFETAEDAARAYDEAARLMCGPRARTNFPYNPNMSQSLRRSSSRRH

SEQ ID NO: 912 - protein, 88 aa, Eucalyptus grandis
MEAAAAAAKVVGEAEELPKTIVRRVVKEKLSRCSDDGDVSLHKDALLAFSESARIFIHYLSATANDICKESKRQTINADDVLKALEEM

SEQ ID NO: 913 - protein, 84 aa, Eucalyptus grandis
PVHEQGQLRGVDRLEGSHWVPIGWERISALAQTVQVDAGWGMQLDSMDDDEDLTVADMETPYWERPAGPIWWCHFSAGHPAVEA

SEQ ID NO: 914 - protein, 184 aa, Eucalyptus grandis
MKPTIDLEVEAVSENDSEISSQVASNLSNQEPSMGPSNDSLANSSYLISPSAVGSGSETVFLDLSLGCSNDESSGRDSVGVAFSSTSECSNEPESHPAAAGPTTSRVFSCNYCQRKFFSSQALGGHQNAHKRERTLAKRAMRMGMFSSQRYSSLASLPLHGSPTVRDLGIKAHSSVHQVHQGML

SEQ ID NO: 915 - protein, 96 aa, Eucalyptus grandis
MWNPSAAQEDDDSWEVRAFAEDTSNIMGATWPPRSYTCSFCRREFRSAQALGGHMNVHRRDRAKLHQSQFRPLANQNSPFASCSSPSSSTLLFPNQ

SEQ ID NO: 916 - protein, 176 aa, Eucalyptus grandis
MAELDYCQTKSSPGAAATRLKLFGFNVSDEEDSAVSDPITVGANGGGGGGGGKATPSGSPEGSVPVGGGGERKYECQYCCREFANSQALGGHQNAHKKERQQLKRAQLHASRNAAVSSLVRNPIISAFATPPHLLATVGPVVVTGAAPTSPSWVYVPRGAPPFQVSHGCVFTTGQG

SEQ ID NO: 917 - protein, 138 aa, Eucalyptus grandis
EHQSNPWHQSSSAANHRQLNLELALEPCSPSSSSSPASLHPLAVPAKDNKLYSCNFCQKKFYSSQALGGHQNAHKLERTLAKKSRDLCSAAKPPAATSNGHHVRPSFQSVVYENQPRLARHVGDDMRYAGTNPLYGSS

SEQ ID NO: 918 - protein, 68 aa, Eucalyptus grandis
QLSSVDREARVLRYREKRKNRKFEKTIRYASRKAYAETRPRIKGRFAKRADIEAEAERMFGFGVVPSF

SEQ ID NO: 919 - protein, 224 aa, Eucalyptus grandis
RGPWTVEEDLTLVNYIANHGEGRWNSLARSAGLKRTGKSCRLRWLNYLRPDVRRGNITLEEQLLILELHSRWGNRWSKIAQHLPGRTDNEIKNYWRTRVQKHAKQLKCDVNSKQFKDAMKYLWMPRLVERIQAASASVSTATVAAAAMAAPPTMATTAASNIGGMAFPPALAGMGGDFRGGRVNVAPSYSTPENSCTTASSDSFGAQVSPVSDLTDLDRVLTLS

SEQ ID NO: 920 - protein, 286 aa, Eucalyptus grandis
MSLWADYDHAAATDLSAFWPPPATPPPPAPAPPLSQESLQRRLQALIEGARGRDGEEGAGGPAAAWTYTIFWQSSGDYSGPVLGWGDGYYKGDGRARSRGSACSQAEQEHRKKVLRELNSLISGAPPADDAVEEEVTDTEWFFLVSMTQSFAGGVGLPGRAYFSSNPAWVTGAERLGNCGCDRARQAQIFGLQTIACVPVLNGVVELGSTEPIYQSSDLISGIRGLFNFHESEMGCGGRVLNSEHDPASLWICDPPVTMEINDRPMTFQIENPSSSSLTESPSAIC

SEQ ID NO: 921 - protein, 101 aa, Eucalyptus grandis
MVPPFPTAELPLNENDSQDMVIYHVLNEAMSQNNSSLPHPNQSGSPSSGGSLEPSRGITKKHYRGVRRRPWGKFAVRFATRYATGPEFGSGHSRQPRRRRW

SEQ ID NO: 922 - protein, 139 aa, Eucalyptus grandis; identical to SEQ ID NO: 909

SEQ ID NO: 923 - protein, 222 aa, Pinus radiata
MGQQSLIYSFVARGTVVLAEYTEFKGNFTGIAAQCLQKLPASNNKFTYNCDNHTFNYLVEDGFAYCVVADESVGRQVPMAFLERVKEDFKRRYGGGRADTAVANSLNRDFGSKLKEHMQYCIDHPEEISKLAKVKAQVSEVKGVMMDNIEKVLDRGEKIELLVDKTENLRFQAQDFQKKGTELRRKMWFQNMKVKLIVLGIVVALILIIVLSVCHGFNCSKK

SEQ ID NO: 924 - protein, 105 aa, Pinus radiata
MGRGKIEIKMIENTANRQVTFSKRKGGLLKKAHELSVLCNAEIALIVFSNTGKLHDWSSSSMKKVMEKYQKSDQGLGLMDYQQQQLLCEMKRITKENESLRARLR

SEQ ID NO: 925 - protein, 102 aa, Pinus radiata
VPSPLVPTRENYFVRYCKQHSDGIWAVVDVSLDTLRGNPQPHPNCPPSTLRCRRRPSGCLIQEMPNGYSKVTWVEHVEVDERAVHRIYDKLVSTVSRRTPYR

SEQ ID NO: 926 - protein, 176 aa, Pinus radiata
LSNIEPKQIKVWFQNRRCREKQRKEASRLQTVNRKLTAMNKLLMEENDRLQKQVSQLVYENGYMRQQLQNASVAATDTSCESVVTSGQHQHNPTPQHPPRDASPAGLLSIAEETLTEFLSKAKGAAVDWVQMPGMKPGPDSIGIVAISNTCNGVAARACGLVGLDPTKVAEILKDR

SEQ ID NO: 927 - protein, 68 aa, Pinus radiata
ILPEGPPESRSVIDNRQVEGSILTIAFQILVNDLPSAKLTLESVETVNNLISCTAQRIKAALHKVEDV

SEQ ID NO: 928 - protein, 68 aa, Pinus radiata
MGRALGRTEIKRIENEVSRNVSFRKRRRGLLKKAAELSILCDATVGVVVFSPAGKLSEYASTSESNGY

SEQ ID NO: 929 - protein, 126 aa, Pinus radiata
IRNPTNRHSSFYKRKGGLLKKAFELAVLCDAEVALIIFSETGRIYEFASHDDVTTVLAKYRIQTKTAGNAMPSSLQKTEFDQLQVRMLQEKIDNLEKTKKHMVGENLESLTWKELQQVEKKLSKAT

SEQ ID NO: 930 - protein, 90 aa, Pinus radiata
LFHPARIGGFGGGQVILPLAHTVEHEEFLEVIKLENHGLTQEEALLSRDMFLLQLCSGLDENAVGACAELVFAPIDASLADSSPLLPSGF

SEQ ID NO: 931 - protein, 138 aa, Pinus radiata
MGRGRVQLRRIENKINRQVTFSKRRNGLLKKAYELSVLCDAEVALIIFSTRGKLYEFASSSMNKTLERYEKCSYAMQDTTGVSDREAQNWHQEVTKLKGKVELLQRSQRHLLGEDLGPLNVKELQQLERQLEVALTHL

SEQ ID NO: 932 - protein, 161 aa, Pinus radiata
MGQQSLIYSFVARGTVVLAEYTQFTGNFTTIANQCLQKIPASNNKFTYNCDRHTFNYLVEDGYTYCVVADESVGRQLPIAFLERIKDDFKKRYGGGKADTAVAHSLNKDFGPKLKDHMQYCVDHPEEINKLAKVKAQVSEVKGVMMENIEKVLDRGEKIEL

SEQ ID NO: 933 - protein, 54 aa, Pinus radiata
FPTGNGGTIELLYMHTYAATTLASARDFWTLRYTTVLEYGSLVVCERSLSGTQG

SEQ ID NO: 934 - protein, 123 aa, Pinus radiata
RREACCPQPSLMARAPHHHQQQQHHQHHQQEASRMVTSLEVDIDTACSSKPNDSIDALKSKIACHPHYPQLLAAYMDCQKVGAPPEVVTVLDEIIQENQLGRHSGTMDIGVDPELDQFMEAYC

SEQ ID NO: 935 - protein, 113 aa, Pinus radiata
MGRGKIEIKKIDDVTSRQVTFSKRKMGIFKKAHELSVLCDAEVAVLIFSNTGRLYDYASSRCMERTIERYEKCTKAINCPTSDPIVENKSPIQEGIEILRQKLRALQRLQRNL

SEQ ID NO: 936 - protein, 162 aa, Pinus radiata
VQEVAHIANGSHPGNCISLLRVNACSTSQNVELILQESCTDASGSVIVYAPVDVPAINIAMSGEDPSYIALLPSGFAILPDGQNRSSTSSLLEGANSSSNSSNSSGLDSPLTRGGSLLTVAFQVLVSHLPTAKLGLDSVTTINNLICNTVQQIKSALHCADV

SEQ ID NO: 937 - protein, 114 aa, Pinus radiata
NRRARTKWKRNEVECDNLKRCCESLREENRRLEKEVQSLRAMKVPQSPNSMPLAAATLAMCPACEGLAIKNRGAATSSTAKSQQSLLTIMGIGDVNMISKNNQTPSMGMGDEMN

SEQ ID NO: 938 - protein, 120 aa, Pinus radiata
MLKTLERYQKCSYVLQDATVSDREAQNWHQEVGKLKAKVELLQRSQRHLLGEDLGPLSIKELQQLERQLEVALTHVRSRKTQVMLEMMDELRRKERILQEVNKSLRKKLQEAEGQAFNAM

SEQ ID NO: 939 - protein, 110 aa, Pinus radiata
SDTANSSELLGSSRSDGDHPHHGHHDQQQQQQENHMVWQNSRLKADVLQHPLYDQLLAAHVACLRIATPVDQLPKIDAQLAQQHHVVAKYSVLGRNQLLTGEEKEELDRF

SEQ ID NO: 940 - protein, 86 aa, Pinus radiata
RNYLGEYTGELISHREADKRGKIYDREDSSFLFNLNDQYVLDAYRKGDKLKFANHSPTPNCYAKVIMVAGDHRVGIFAKERIAAGE

SEQ ID NO: 941 - protein, 128 aa, Pinus radiata
MGRGKIEIKMIENATNRQVTFSKRRGGLKKKAQELSVLCNAEVALIIFSSTGKLHEWSSSSSFFMLQKSMKKILERYQKSEQGLGLMDYQHQQLLCEMRRITKENESLQERLRHMNGEEVNSLKLPEL

SEQ ID NO: 942 - protein, 86 aa, Pinus radiata
AICSISFHPYPKDADKHLLARQTGLTRSQVSNWFINARVRLWKPMVEEMYMEELREAETQNHAADSKVTTESGQNNEETVSKEGAG

SEQ ID NO: 943 - protein, 58 aa, Pinus radiata
GAGYSSVSGIDEHAAGFCSQLVFAPIDASFADDAPLAALWFPSNSSRIWIRMFLLQNG

SEQ ID NO: 944 - protein, 112 aa, Pinus radiata
DGGGRGAGHFVMEQFIPEQAVISDSSISSVKTEVCSGSGGQFELIRRKEEGRCGRAYAEPSFVVTPLVTSLPPQQQEGRMVTSLAVDMDSSCSCKPNEADAMRAKLFAHVHY

SEQ ID NO: 945 - protein, 134 aa, Pinus radiata
ARGKTQMRKIESATSRQVTFSKRRNGLMKKAYELSVLCDAQLGLIVFSPRGKVYEFSSTCMQKMLARYEKCSEGSDTSTSKEQDVQCLKRESANMEERIEILESMQRKMLGEELASCALKDLNQLESQVERGLR

SEQ ID NO: 946 - protein, 110 aa, Pinus radiata
SLVWGALKMGKTKMEIKRIQNPSRRQVTFSKRKNGLLKKAFELSVLCDAEVALIIFSETGKICEFASHDDMATILEKYRIYTETHGNMESSSVQSVKIGESQLKALREKM

SEQ ID NO: 947 - protein, 92 aa, Pinus radiata
KLPKEARQKLLDWWTRNYKWPYPSESQKIALAESTGLDQKQINNWFINQRKRHWKPSEEMQFVVMDSPNPHNAAFFLEGHLRTDGTAFSMDC

SEQ ID NO: 948 - protein, 155 aa, Pinus radiata
FSCVSKAAMILAEHSEGDAELEEVAGECLERVPPLHSRFTHTTKRKMYSFLMDGPFVYCAIVDEALGKPQVFVFLEHVRDEFKKLLKNRGCEGLSSCCFDKEFGPVYKRLVAPLVGVPQIEKDRLMEEESKSQPAKTHPVQVNNSPKDSLPVYDN

SEQ ID NO: 949 - protein, 165 aa, Pinus radiata
DGSLVICERSLSAAQGMPMVSQSQSFVHGELLSSGYLIRPCEGRGALVIMVDHRNLEASSVPEALRPLYESSTFFAQKMTVEASYHLQGKVQPEMISLSKKLQQPCNVRSYSQRLCRGFNEAVNTLPDDGWMSLSKDGLGDVTICESFVKLPEPNASQIAYVNSM

SEQ ID NO: 950 - protein, 153 aa, Pinus radiata
RALQQLGMIQQHAWRPQRGLPERSVSVLRAWLFEHFLHPYPKDADKHMLARQTGLTRNQVSNWFINARVRLWKPMVEEMYVEETKEAEVDHGSNDKTGKESGEKKEDALSKEGAAGNNGNIHEQQSGKISKLDNIAQDGGADEKPAGVPKSEN

SEQ ID NO: 951 - protein, 107 aa, Pinus radiata
MNLMESFEAKGKGEKRRTVRGKTQLKRIENGTSRQVTFCKRRNGLLKKAYELSVLCDAEVALIVFSPRGKLYEFANPSMQKMLERYEKCSEGSNPTSTAKEQDVQCL

SEQ ID NO: 952 - protein, 217 aa, Pinus radiata
MVRGKTQMKRIENDTSRQVTFSKRRNGLLKKAYELSVLCDAEVGLIIFSPRGKLYEFASPSMEEILEKYKKRSKENGMAQTTKEQDTQYSKHSKQKLANMEEQIRILESTQRKMLGEGLESCSMAELNKLESQAERGLSHIRARKTEILVDQIECLKRKERLLSEENALLSRKWVDRQSVDGSGSTSSSIGLGSIEQIEVETQLVIRPPNAQDHCSV

SEQ ID NO: 953 - protein, 183 aa, Pinus radiata
MESEEDKISPENKKRRLKTPQQVEGLESFYAEHKYPSEAMKSQLSEELGLTEKQVQGWFCHRRLKDKRLMKEEASNNGKQDPHNGIMQDSVNGVKQDSSGSGKKSDHQRHSRCKEVESQRFANAMDYPAAVLASELRDHDLFKVNHDNEDTFAGSSSASQDRSSLQSGNPYEAEARRRPFQNG

SEQ ID NO: 954 - protein, 105 aa, Pinus radiata
ALFGAVQSLPVFTFANQAGLDMLETTLVALQDISLEKILDDNGRKSFCSDIAQIMQQGYAYLPAGVCVSSMGRPASYDRAIAWKVLNDEENPHCIAFMFMNWSFV

SEQ ID NO: 955 - protein, 85 aa, Pinus radiata
QRIWHEPASNNKFTYNCDNHTFNYLVEDGFAYCVVADESVGRQVPMAFLERVKEDFKRRYGGGRADTAVANSLNRDFGSKLKEHM

SEQ ID NO: 956 - protein, 119 aa, Pinus radiata
VNSNQSNMLILQESCTDASGSFVIYAPVDIVAMNVVLSGGDPDYVALLPSGFAILPDGPKCMAVTNSGINDLGSGGSLLTVAFQILVDSVPTAKLSLGSVATVNSLISCTVDRIKAAVT

SEQ ID NO: 957 - protein, 90 aa, Pinus radiata
QLLFHLRSQSISPLVTCLRSHRAPPWPTPISWLCIIIRVMTEEQMETLRRQICVYSTIGSQLVEMHRAMSQQQAFFSGRLCLWDNTCFMI

SEQ ID NO: 958 - protein, 103 aa, Pinus radiata
MGRGRVELKRIENKINRQVTFSKRRNGLLKKAYELSVLCDAEVALIIFSSRGKLYEFGSAGYGIEISGLFSGILYYNIRVGEGCEGEKRGCKVYSVICFKGKS

SEQ ID NO: 959 - protein, 63 aa, Pinus radiata
MVRGKIQMKRIENTASRQVTFSKRRNGLLKKAYELSVLCDAEVGLMIFSPGGKLYEFANTSME

SEQ ID NO: 960 - protein, 60 aa, Pinus radiata
MLLQNVPPALLVRFLREHRSEWADCNIDAYSSATMKANAYNVPGSLGGITGSQVILPLAH

SEQ ID NO: 961 - protein, 52 aa, Pinus radiata
TSRLHFVDQQLRQQRALQQLGMIQQHAWRPQRGLPERAVSILRAWLFEHFLH

SEQ ID NO: 962 - protein, 154 aa, Pinus radiata
AVVIWMGDPERTKMPPIKITITITIMITSSSRRGGNVTTDTLLVKFRRWKRCLRSVHILMTNKGSGSALNWALKPRQVKFWFQNRRTQMKAQQDRSDNAILRAENENLRNENVALREAIKNGACPNCGGSTSLGEMPGFDEHHFRIENTRLKEE

SEQ ID NO: 963 - protein, 143 aa, Pinus radiata
RILKLEIPTSYLVCKARKMGKKKVEVKLIQNPTSRQGCFYNRKCGLLKKAFELSVLCDAEVALIIFSQTGKIYEFASHDDVNAILAKYRIQTGTTTNAMPSSLQNTEPETLHEETNMLGKRKKVEKLHEKINMLEKRGKNMVW

SEQ ID NO: 964 - protein, 123 aa, Pinus radiata
DHHAVEDRELKNHLLRKYSGYLSSLKQEFMKKKKKGKLPKDARQKLLDWWSLHDKWPYPSETEKIALAECTGLDQKQINNWFINQRKRHWKPSEDMHFMVMNSHSPHSAALYVERHMMTEGYL

SEQ ID NO: 965 - protein, 71 aa, Pinus radiata
MEHLNAAAAQASSSLYGVSMAEYGDVGVSSMMALMTQHEPHESESTMTTSMPSSFSSFHGHAECLLSAAMF

SEQ ID NO: 966 - protein, 111 aa, Pinus radiata
MGRGKIEIKKIENSVHRQVTFCKRRGGLMKKAYELSVLCDADVALIVFSSRGKLYELGTSNNNNNSMRSILERYQKCSQTAKHMNFSNNTSDEKMKQEINLLKHKLISTYQ

SEQ ID NO: 967 - protein, 106 aa, Pinus radiata
MNYEQRLIAAARLADNLNSTTAKEFDIPSAEEVAEKCSEWGVTAQLKAHQAQGLSWLIRRYAIGVNVILGDEMGLGKTLQAISLLAYLKDRRKCPGPFLVLCPLSV

SEQ ID NO: 968 - protein, 257 aa, Pinus radiata
SVDVLTAFSTGNGGTIELLYMQMYAPTTLASARDFWTLRYTSVLEDGSLVVCERSLSGTQGGPSMPAVQQFVRAEMQPSGYLIRPCEGGGSLIHIVDHMDLEPWSVPEVLRPLYESSTVLAQKVTMSALRHLRQIAQEASSDVVLGWGRQPAALRTFSQRLCKGFNEAVNGFTDDGWSLMGNDGMEDVTILVNSSPSKLFGQQFASSDGLPALGGGILCAKASMLLQNVPPALLVRFLREHRSEWADSNIDAYSAAS

SEQ ID NO: 969 - protein, 135 aa, Pinus radiata
MAMEERSGDLLKGCGLSENALDAISEGSIQNHWSWSEVKQLSVTLLRALDAGIEHSLLGSMMSIDRYAAAESFHRLAWAYAHVPDLHIMWLLHLCDAHQEMQSWAEAAQCAVAVAGVIMQALVGRNDAVWGKEHV

SEQ ID NO: 970 - protein, 128 aa, Pinus radiata
RGRVQLRRIENKISRQVTFSKRRNGLMKKAAELSILCDAEVALIVFSNKDKLYEFASSSMTKILERYRKRSNLIQDIGKDPQNSDIELTRLKEEVDRLQRSRRHLLGEDLHQLGATDLQHLEQQLEEA

SEQ ID NO: 971 - protein, 147 aa, Pinus radiata
MDSFEAKGKGEKRRTVRGKTQMKRIENATSRQVTFSKRRNGLLKKAYELSVLCDAEVALMVFSPRGKLYEFANPSMQKMLERYEKCSEGSKTTSIAKEEDPKALKREIANMEERIEILERTQRKMLGEELASCALKDLNQLESQVER

SEQ ID NO: 972 - protein, 45 aa, Pinus radiata
MEKQNSGEDSDSKGQLDNGKYVRYTNEQVETLERAYNECSKPSTS

SEQ ID NO: 973 - protein, 97 aa, Pinus radiata
MGAFALLSSWIDAATNPKYRKKRKQFQTVELRVRMDCEGCERKVRNALNSMKGVSSVEVERKQYKATVTGYVDANKVLKRVRQTGKKAELWPYKPYH

SEQ ID NO: 974 - protein, 135 aa, Pinus radiata
FSNTWFSGNLLAPGANKQMHLDSSSTGAPGLSNVLIGSKYLKAAQQLLDEVVNVGKGIKPDSAKHQKSQSWIGTTANKENSGAEGGGKDGAAAAPTWRSTSAQETNDRPSELSPAERQELQMKKAKLVAMLDEVD

SEQ ID NO: 975 - protein, 93 aa, Pinus radiata
YSEVRTRARFWRRKGRVRRFKYTCKSAGHPSIRKRIKDGKGQPCRQYTPCGCQLTCGKQCPCLRNGTCCEKYCGCSKSCKNRFRGCHCAKSQC

SEQ ID NO: 976 - protein, 114 aa, Pinus radiata
ADESLWIPNLDAGKETLSYEEYMRQFPSTITPKPIGLATEATRETGMVITNSLNLVETLMDVDHWKEMFPCMISRAATVDVISSGMGGTRNGALQLMYAELQVLSPLVPAREYF

SEQ ID NO: 977 - protein, 148 aa, Pinus radiata
QSENIMSTRIPSSFSSFHGHADCLLSAAMFQGSQGDHKLNPQPGMNQQLVSEQSIMSDSSMPFVKTKACSGLRNQFEFHREQPGNCYTDQSSNIPLSPIVTSLASQARGEARMIPSLDANSAHFNVDNEEHAIKSKILAHPQYPSLLG

SEQ ID NO: 978 - protein, 107 aa, Pinus radiata
MRNPICTNCGGPAVLGEMSFEEQQLRIENARLKEELDRLCALAGKFFGRPIPSMPSVPLMPKSSLDLGVGGMPTSLPSASADLMHGPAGGRTGNIIGIERSMLAELA

SEQ ID NO: 979 - protein, 251 aa, Pinus radiata
MMMSGGRMYGGPNVLVTANENISRSADALEALLSSPVFNGSRSVANLEEVIGNVSKRSFYNSFDQEETGDEDLDDCIHPPEKKRRLTADQVQFLERSFEIENKLEPERKIQLAKELGLQPRQVAVWFQNRRARWKTKQLERDYDILKSRYENLRVDYDSLLKEKDKLRAEVTFLTDKLHDSDHEALTKDSESADKKVYPQPASHSDCVGEPERSTAAKDTPPGCKHEDLLSSGTDSSGVLDEDSPHHVDCG

SEQ ID NO: 980 - protein, 128 aa, Pinus radiata
KIENTTSRQVTFCKRKNGLLKKAYELSLLCDAEVALLIFSTSGRLYEFANKSVSATTERYMRTYAENMPQSRALYPDCHHWQEEVRKLTQQRDSLTNSIRQIMGEGLESLSMKELKHIQVQLEKSISC

SEQ ID NO: 981 - protein, 119 aa, Pinus radiata
YTAEQVEALERLYNDCPKPSSLRRQQLIRECPILSHIEPKQIKVWFQNRRCREKQRKEASRLQTVNRKLTAMNKLLMEENDRLQKQVSQLVYENGYFRQQIQTVSITTTDTSCESVVTS

SEQ ID NO: 982 - protein, 85 aa, Pinus radiata
KHEFDVRYQKLEDKLYIAQLYFPLIGLILDEMPVFYNLSTVEKREVLICIMQIIRNLDDPSLIKAWQQSIARTRLFFKLLEECLV

SEQ ID NO: 983 - protein, 96 aa, Pinus radiata
GLLVTMRLFAATEPKRVFAVTKRIFLLGFVSFFLREGLVASVWLPVSPQRLFDFLRDERLRSKWDILSNGGPMQEMAHIPKGQDPRNCVSLLRASI

SEQ ID NO: 984 - protein, 109 aa, Pinus radiata
LVSLYNNHLNGILADEMGLGKTVQVISLICYLMEQKNDRGPFLVVVPSSVLSGWLSEISFWAPSISKIAYTGSPDDRRRLFRENISQQKFNVLLTTYEYLMNKRSTKTE

SEQ ID NO: 985 - protein, 52 aa, Pinus radiata
PKDADKHMLARQAGLTRSQVSNWFINARVRLWKPMVEEIYMEEIKEAELGHS

SEQ ID NO: 986 - protein, 101 aa, Pinus radiata
QQDDDAKVYESPLRRKNAEAPRTRWRFLPLESALENPYQGLMKHCTSLLKTLMNHKFGYVFNEPVDPVALGVPDYFTVITSPMDLGTIKAKLQDSVYSSPL

SEQ ID NO: 987 - protein, 230 aa, Pinus radiata
CTGVAARACGFAGLEPSKVADILKDRPAWLHDCRRLDVLTAFPTGKGGAVELLYTQMYAPTTLAPARDLLTLRYTSLLEDGSLVVCERSLTGTQSGPNMPPVQHFVRAQMLPSGYLIRPCEGGGCIIHIVDHMDLEPWSVPEVIRPLYESSAVLAQKMTITALRHLRQVAQEVSGEVVLGWGRQPAALRAFSQRLCRGFNDAVNGFADDGWSLLGSDGVEDVIIAINSSP

SEQ ID NO: 988 - protein, 164 aa, Pinus radiata
QYLRQQLQLLHARAGNNTRSLQQMAVTANDTSSDSVVTSGQRQQHSPQHPPYSVSTSRLFFIAEETLTEFLAKATGTAVDWIQMPGMKPGPDSIGVVAVAHACGGVAVQAWGVVSLEPSEVAEALRDKVSWLCDCRKMEVLGTFDSTDGRKLELLHTQMYAPIT

SEQ ID NO: 989 - protein, 107 aa, Pinus radiata
MGKTKMEMKHIQNPSRRQVTFSKRKNGLLKKAFELSVLCDAEVALIIFSETGKISEFASHNDMATILEKYRIYTQTETDGNMGASSVQSVKGWFPNFLEIAGFSVCG

SEQ ID NO: 990 - protein, 68 aa, Pinus radiata
MGRGPVQLRRIENKINRQVTFSKRRNGLIKKASELSILCDAEVALIVFSNKGKLYEFSSSSMTKILER

SEQ ID NO: 991 - protein, 230 aa, Pinus radiata
LSLSPQQLSNIQLSCFQNQPTDSEVNCPSISEATSQENLNRSDRLTSKLSGSLSSFRASSRDGMLGTKFLGSVNGPECNKPMHHGTNAIGAAELSNTLTGSKYFKAAQQLLDEVVNVGKGIKSDSVNHQKSQTWFGAISDKKNIATEATTNDRTTSAITGASISAEVMKNEHAFGLTPADRQELQMKKAKLVAMLDEVDRRYRQYYHQMQIVVSSFETAAGFGAAKTYTS

SEQ ID NO: 992 - protein, 76 aa, Pinus radiata
MGRGKIELKKIESTSNRQVTFSKRRMGLLKKAQELSVLCDAEVGVIIFSNTGRLYDFSSSSMEKMIETYYRFIEKN

SEQ ID NO: 993 - protein, 77 aa, Pinus radiata
VTLFLVLQVLDRGEKIELLVDKTENLRFQAQDFQKQGTQLRRKMWFQNMKVKLVVLGIVFVLILIIWLSICHGFKCH

SEQ ID NO: 994 - protein, 110 aa, Pinus radiata
PNSRSDGNGKADRSDSMGTEARTRTRFWRRRGRVRRLKYTWKSAGHPSIKKRIADSKDQPCRQFTPCDCQSMCGKQCPCLRSGTCCEKYCGCSKGCKNRFRGCHCAKSQC

SEQ ID NO: 995 - protein, 293 aa, Pinus radiata
ASQFSGNDMRNYGAKEVTSGLATGGQRPPALQLNLAALDSSGDGAAAKEKRTPKVNPYYLNSEFVMGKDKMPPPPPDNKKGGMKRTAQGKSEIRETKRPVADPMNGKILQDVMKQCGFLLSRLIKHKHGWVFKAPVDTVALGLHDYNTIIKQPMDLGTAKAKLNANEYKSPQEFAGDIRLTFNNAMTYNPNGHEVHIMAEQMLQFFEDRWKPICDRYEEEKRKLSWSVNDGLLPGASQNMKNFPFGETPKKNLKKTEPLLGLSPRPPPNAKSKANQTLRAPAPKKPKAKDLHK

SEQ ID NO: 996 - protein, 144 aa, Pinus radiata
KFDICVTSFEMAIKEKTALKRFSWRYIIIDEAHRIKNENSLLAKTMRIYSTNYRLLITGTPLQNNLHELWSLLNFLLPEIFSSAETFDDWFQISADNDQQEVVQQLHKVLRPFLLRRLKSDVEKGLPPKKETILKVGMSQMQKQ

SEQ ID NO: 997 - protein, 81 aa, Pinus radiata
MGRGKIETKKIENSVRRQVTFWKRRGGLMKKAFELSVLCDAEVALIVFSGRGKLYELETSHSNRNKYAPYSTSTTHQCRWF

SEQ ID NO: 998 - protein, 114 aa, Pinus radiata
YYLIVIDAKVIQAGLFNNTSTAQDRREMLEEIMRRGTNSLGTDVPSEREINRLAARSDEEFWLFEKMDEERRQKEGYRSRLMEEHEVPDWVFSVPTGKNDKGVENMDSNLGFDQ

SEQ ID NO: 999 - protein, 183 aa, Pinus radiata
ADSPHFNEADAIKSKILAHPQYPNLLGAYIDCQKIGAPPEVAARLDALSHEYENQQHRSSLSIGMDPELDQFMEAYCEMLTKYHEELTKPFKEAMSFLKKIEAQLNSLGKGTIRISPSAENDEKTEGGASSEEVEDGSGGETDFQEVDHHAVEDRELKDHLLRKYSGYLSSLKQEFMKKKKKK

SEQ ID NO: 1000 - protein, 122 aa, Pinus radiata
CKNVFTRLQGPVKEGRHTALFMEIPKRNENPTYYRLIENPIDARTIEQRLDRFSYGSVLDFAADVQLMLENAIRFYGHSSEVKANARRLQALFFQRMADSFPDDNFSSFKTRSLVALGQSAN

SEQ ID NO: 1001 - protein, 115 aa, Pinus radiata
LVNSGMAFGAKRWIATLQRQCERLASVLASNIPSRDLGVIPSPEGRKSILKLAERMVTSFCAGVSASTAHTWTTLSGSGAEDVRVMTRKSVDDPGRPPGIILSAATSLWLPVPPK

SEQ ID NO: 1002 - protein, 130 aa, Pinus radiata
LESQFDQSFEYPPVEQLVKQCGKFGLLERLLKHLKAQKHKMLIFSQWTKVLDLLEYYLSERGYEVCRIDGSVKLEDRKNQIRDFNDPDSNFCIFLLSTRAGGLGINLTDADTCFIYDSDWNPQMDMQAMD

SEQ ID NO: 1003 - protein, 276 aa, Pinus radiata
VKLGTTNTWLSRAVSGQHRAQQQQQQHYAERSVEEGRKWCGCAAGSRDCIHSNFLKLQNPASAGSSSAAANALSGRWLMPGPLLNDKIEGREGVELLGGEIPGESIMALSAQFKTAGSAAPERGLLNLHSADAVNSNGEPVDSGGAGGDRDGGEEAEDHAALWQSARIKADIVSHPLYDQLLSAHLECLRIATPKDQHSMIDAQLEQSQHVVTKYSVLGNDNFLVGDKKELDQFMTQYVLLLCSFKEQLQYHVHVHVMEAVRACIDLQHSLLTLTG

SEQ ID NO: 1004 - protein, 123 aa, Pinus radiata
SCAVQSQPAASGTRWNPTPDQIRILEMFYKGGMRTPNAEQIEHITAQLRQYGKIEGKNVFYWFQNHKARERQKQKRNSSMHQVAATAAKKTPTTIMADNPNELHKPNSNGTYSLYNLPFTAMS

SEQ ID NO: 1005 - protein, 90 aa, Pinus radiata
MGKTKMEIKRIQNPSRRQVTFSKRKNGLLKKAFELSVLCDAEVALIIFSETGKICEFASHDDMATILEKYRIYTETDGNMESSSVQSVKV

SEQ ID NO: 1006 - protein, 123 aa, Pinus radiata
MSVFETGNERKRPAGNSYSALELSDDIGDEDGSDDCIHLGEKKRRLTLEQVRALEKNFEMANKLEPEKKMQLAKALGLQPRQIAVWFQNRRARWKTKQLEKDFNILKHDYDSLKQNYDNLMEE

SEQ ID NO: 1007 - protein, 114 aa, Pinus radiata
MGKTKMEMKHIQNPSRRQVTFSKRKNGLLKKAFELSVLCDAEVALIIFSETGKISEFASHNDMATILEKYRIYTQTETDGNMGASSVQSVKVGESQLKALHERMDNLKKKERNM

SEQ ID NO: 1008 - protein, 90 aa, Pinus radiata
MASNGIMFNASNRNLIVMVNEAPSFEANSSLDGVMKNVSKRPFYNTLDADEAGDEDLLDECVHQPGKKRRLSVEQVRFLEKSFELDNKLE

SEQ ID NO: 1009 - protein, 107 aa, Pinus radiata
LERSIRQQRAFHHLGLMEQHPWRPQRGLPERSVSVLRAWLFEHFLHPYPTDADKHILAKQTGLTRSQVSNWFINARVRLWKPMVEEMYMEELKEEKVDQGTHNSEAE

SEQ ID NO: 1010 - protein, 126 aa, Pinus radiata
MNLNDHTYNLSPMANSGNPEEQIDEDAVDDFMNYQPESKKRRLTVEQVRSLERSFEIETKLEPEKKIQLAQELGLQPRQVAIWFQNRRARWKTKQLERDYSVLKASYDALKSDFERLQQENKNIRA

SEQ ID NO: 1011 - protein, 96 aa, Pinus radiata
MFTISTCTTHAQSLIYSFVARGTVVLAEYTEFKGNFTGIAAQCLQKLPASNNKFTYNCDNHTFNYLDEDGFAYCVVADESVGRQVPMAFLERVKED

SEQ ID NO: 1012 - protein, 110 aa, Pinus radiata
GCPGNIHDDDEEEDEEECSGTGQQTRKKRRLSLQQVRSLEKTFEVENKLEPERKLQLAQELGLQPRQVAVWFQNRRARWKTKQLERDYGQLKLNFECLKSNFDAIKQENQ

SEQ ID NO: 1013 - protein, 108 aa, Pinus radiata
MAGEKRKINRIANASARQVTFAKRRRGLFKKAQELSILCEADVALLVFSSTGKLYQYSSSSMKMILDQYILYSRSIQKDGKPNLEESHDIQKIKQQIKDISQNLRKLR

SEQ ID NO: 1014 - protein, 177 aa, Pinus radiata
MGMDMEDCNTGLGLGMSIGLGMNLMREDLQSHRHHVNGPPVQLDLLPLAPVLPSRDLPWGKTSPGTDGERSAGESKATVPRRIDVNKLPASCYYNEDTGTINVSSPNSALSSFHVDSGGAINAESSCYGMSVKREREATEELEAERACSRVSDEEADQEGGTRKKLRLSKEQSALLE

SEQ ID NO: 1015 - protein, 61 aa, Pinus radiata
MGKKLELKRIQNPNSSRDSFSKCKRGLLKKSVKLFVLCDAEVSLIILSETAKIYEFASNKS

SEQ ID NO: 1016 - protein, 51 aa, Pinus radiata
RFQAQDFQKQGTQLRRKMWFQNMKVKLVVLGIVFVLILIIWLSICHGFKCH

SEQ ID NO: 1017 - protein, 68 aa, Pinus radiata
MGQQSLIYSFVARGTVVLAEYTQFTGNFTTIANQCLQKIPASNNKFTYNCDRHTFNYLVEDGSHTVLL

SEQ ID NO: 1018 - protein, 155 aa, Pinus radiata
MDREKLMKMAGAVRTGGKGTMRRKKKTIHKTATADDKRLQSTLKRIGVNNIPAIEEVNIFKDDHVIHFANPKVQASIAANTWVVSGSSQTKKLQDLFPGIINQLGPESFANLRKIADQFRRPEPNPAQGEDDDDDDVPELVEGETFEEAAKKDSS

SEQ ID NO: 1019 - protein, 249 aa, Pinus radiata
MMQPAVGVAPPPPVAAPAMDPQQQQQQWMMMQQQMQPQQAQPQPPPQAGFWPPQHQPQPQHAQSQLMAQQYPQQPTSADEIRTLWVGDLQYWMDETYLHGCFGNSQEVVSVKIIRNKQTGQSEGYGFVEFASHAGAERALQTYNGAQMPNTEQFYRINWATFGIGEKRPEIGPDYPIFVGDLASDVTDYLLQETFRTRYQTVKGAKVVTDRVTGRSKGYGFVRFGDENEQVRAMTEMNGVFCSSRPMRI

SEQ ID NO: 1020 - protein, 82 aa, Pinus radiata
ASFGLGERRLLTGPEHSIFVGDLAPDVTDYLLQETFRSRYTSVRGAKVVTDPSTGRSKGYGFVKFADENERNRAMTEMNGVY

SEQ ID NO: 1021 - protein, 107 aa, Pinus radiata
RQEPSLKKQIIETSEKAIVFSQWTSMLDLLEVPLKKSCIQYRRLDGTMSVIARDKAVNDFKTLPEVTVMIMSLKAASLGLNMVAASHVLLLDLWVESQQLKTKLLTG

SEQ ID NO: 1022 - protein, 99 aa, Pinus radiata
LGFEDYVEPLKIYLNKYRELEGEKSSMAAPPRQSDLQQHHHVNGSDPHPYGHSPHGPMAYHVPGGASFRAWKVTVACSFCYCKEVIEMEMGHGNGDCKV

SEQ ID NO: 1023 - protein, 158 aa, Pinus radiata
MENLPNQQPDLEIAQTHEDPGSRQFKGIRLRKWGRWVSEIRIPKSREKIWLGSYTTPEQAARAYDAAVYCLKGPNAKFNFPETVHDIPSVTSVSRQEIQHAALKYALGQPPPSLQSLEGHAALKYALGQPPPSLQSLEGHAALKYALGQPPPSLQSLQ

SEQ ID NO: 1024 - protein, 197 aa, Pinus radiata
MAFTGTQQKCKACDKTVYFVDQLSADGVSYHKACFRCNHCKGTLKLSNYSSMEGVLYCKPHFDQLFRESGNFNKNFQSQRSSKAIDGLSPEMTRSPSKVSMMFSGTQDKCATCGKTAYPLEKVTVENLSYHKSCFRCSHGGCSISPSNYAALEGILYCKHHFSQLFKEKGSYNHLIKTASMKRAAAVPEVASAVPEI

SEQ ID NO: 1025 - protein, 232 aa, Pinus radiata
KPAGTSRLPEFKSRTITLPSFNIPSSNPRKLLDMVKPSQKQNIHVNGKPESRSLMSRQFKGIRLRKWGKWVSEIRMPNCRAKIWLGSYESPEKAARAYDFAAYCLRGSKARFNFPDSPPEIPCASSLSPSQIQAGAARFAAEEFQMPSDDDTASSSCGSEAESDLPPEIPCASSVSPPPIQAAAPRFAAEEFRLPSDEDTASSSCGSVTESNIDSQQISAEQGSAFWDSLFL

SEQ ID NO: 1026 - protein, 88 aa, Pinus radiata
HQWHRFCSRRLCCTALHNTQKQCTKSAATGKGGIKRIRRQQEAAPSPPEEATLNQQTPPYRGVRRRNWGKWVSEIREPKKKTRIWLGS

SEQ ID NO: 1027 - protein, 501 aa, Pinus radiata
MCGGAIISDFIIPPASRGRRVTARDIWPDFDKFSEFINGGAAVESFDVSVDVDDDEEDSDDDEFLDFEESYQNKKKKQQQPISPTKGFELPLARGLDGPAAKSAVRKRKNLYRGIRQRPWGKWAAEIRDPRKGARVWLGTFNTAEEAARAYDAAARKIRGKKAKVNFVDEPPPSVKKESNNAKGSKKGSSKKIKSYTTPKADFFEGFKTANPSIAQYNFHQKFPNPSCDDLGYQNPLSPLHAICNRNFAAKQSSSALPAYSTEFSDFDDSEVDNLVPQPASFEPMKNINKRKGYNSFESDTSSVSADRSHISWVTEVKTPEISSVPKAEADSDHYDFADMSTPVATSVSAGSPEVQLPPFNNGLNKSPSVEDGVAAEKSPKLEESSQLEISEDLPSLESYPWLFQMPYFEGLDQSLQGVGIGDASFPDGENDLQLWSFDAVPISDSAYISLESLACKQLVIMESRRLVMASFCRPSSNRELVIFPLFFFIQFDGATVISAH

SEQ ID NO: 1028 - protein, 134 aa, Pinus radiata
MAFAGTQQKCKACEKTVYVVDQLTADGSVFHKACFRCHHCNGTLKLSNYSSFEGVLYCKPHFDQLFKRTGSLDKSFEGTPKAVKNEKLNDGEIKTPNRVSALFSGTQEKCLACGNTVYPIEKVSVEGVGYHKAC

SEQ ID NO: 1029 - protein, 76 aa, Pinus radiata
MDGSQNSGGNAVPPFLTKTYDMVDDSSTDSIVSWSPGNNSFIVWNPPEFARDLLPKYFKHNNFSSFVRQLNTYGFR

SEQ ID NO: 1030 - protein, 97 aa, Pinus radiata
HEKKAVLWNMDTLKAKGSLEEHSFLITDVRFSPNSTRLATSSFDRTVKVWDADNPNYTLRTFSGHTGSVMSLDFHPNNEDLICSCDGESEVRYWSVN

SEQ ID NO: 1031 - protein, 117 aa, Pinus radiata
MGYLQELEDQIIGLQNLVKRNERLYGSGNTPSGGVALPFILVQTRPQATVEIEISEDMQLVHFDFNSTPFELHDDAYVLKAMGFCEKPFTDGMDVTGHDSFANGTGFGENNMTITNM

SEQ ID NO: 1032 - protein, 146 aa, Pinus radiata
TRVLLIDDHPLFREGLAGAIQAEPDFEVVGQAGTVDELRGLAPQIEPDVAIVDLLMPSVSGIGVTRELCELLPRCRVLGLSAVVDAAAIAEMLRAGASGFALKTQPAPDILDAVRRTVAGESYLPPSVSREAIDAELAGGAPPSLA

SEQ ID NO: 1033 - protein, 181 aa, Pinus radiata
MSILPKSDSIHIREVWADNLEEEFNLIREIVDDYPLIAMDTEFPGIVVRPVGKFRTVQEYNYETLRSNVDVLKLIQLGLTFSDEDGNLPNCGTDRYCVWQFNFREFNIWEDAYASDSIELLRQSGIDFKKNSERGVDSHLFAELLMSSGIVLNENVRWITFHSGYDFGYLLKLVMNRSLPP

SEQ ID NO: 1034 - protein, 122 aa, Pinus radiata
EHACPMACHPGPCPPCLVSVSKSCWCGSKTLVSRCSVLNKGTSTNAGVGPVLSCGQPCGRLLGCEKHTCEQECHPGPCPPCDIVDVAKCYCGRQERGMACGTGIVETCVVEGEGSWEGRWQC

SEQ ID NO: 1035 - protein, 158 aa, Pinus radiata
MRINEATPKKSLGFQQPYSMKGNYYTQAYGGAVASQAFQSDNDPNNTTIFVGGLDPNATDEDLRQVFGPYGEIVYVKIPVGKGCGFVQFTNRSSAEEALQKLHGTVIGQQSIRLSWGRSPANKQTASWGVQPQADPNQWNGGGAYYGYGQGYEAYGYA

SEQ ID NO: 1036 - protein, 126 aa, Pinus radiata
QYLSPGKSAPFWLCQDMAITSQQHHMNALPYNERSEKRPKFKGIRMRKWGSWGSEIRMPKTRTKIWLGSYETAEQAARAYDAALYCLRGPNAKFNFPDTVPSIPSAFSLSRHQIQLAAARYARDEL

SEQ ID NO: 1037 - protein, 79 aa, Pinus radiata
MEPMDIVGKSKDDVSLPKATMFKIIKEMLPPDVRVARDAQDLLVECCVEFINLISSESNEVCGREEKRTIAPEHVLRAL

SEQ ID NO: 1038 - protein, 132 aa, Pinus radiata
EISLFWLQSFCKLPNMENVPEQEPDNTISLPHEDRGSRQFKGIRLRKWGSWVSEIRMPRSRKKIWLGSYTTPEQAARAYDAAVYCLRGRNAEFNFSVPDIPTASPLSREQIQHAAAEYALGKAPSSFPSFAG

SEQ ID NO: 1039 - protein, 241 aa, Pinus radiata
MNEPDEHAAAQLVQKRSHPLAEVVMPISVRPLAEKCGVEAEEERKRAAEHKKQRSKNWTRAETLKLIRLRAEMEPRFARSGRKSELWEEIAEALRRESVVRDAQRCRDKWEKLTASYKEVRDGQRDRQDFPFFDELDPLLSLKPQKAAAAAAAAATAATAANFVSAETPSNFPTDDEMTEEGSPAGKRRKTTPRGLSATDLDAVRELLESLVSRQQRFFVDLLDSMERKEEIRERIRQEKE

SEQ ID NO: 1040 - protein, 182 aa, Pinus radiata
MVYIVLLDLCESVQPPQGSLQEFSNSIQEEQAMVDLMPKDSRQTMINNTTIFVGRLDPNATDEDLRQVFGQYGDLVSIKIPVGKGCGFVQFANRACAEEALQRLHGTVIRQQTIRLSWGRSPANKQNSQPQGQQPQSDPNQWNGAYYGQGYESYGYAPPPQDPAMYAYGGYPGYGNYNQQVS

SEQ ID NO: 1041 - protein, 66 aa, Pinus radiata
TSYHRPCFKCCHGGCVISPSNYVAHEGRLYCRHHSSQLFREKGNFSQLSKATPTKGVTENSDTDDK

SEQ ID NO: 1042 - protein, 152 aa, Pinus radiata
VGGGGGGKGSPYRGVRMRKWGKWVSEVREPNKRSRIWLGSYSTPEAAARAYDTAVFYLRGPSATLNFPEEARKEQQSDLRLSQLGELSPSSIQRRAAEVGAAVDHAMQAGPVPAQTLREINQENDMKNALSSKLSEGNNFKIEAKNNMRQQG

SEQ ID NO: 1043 - protein, 193 aa, Pinus radiata
MAFAGTTQKCKACEKTVYLVDQLTADNSVFHKSCFRCHHCNGTLKLSNYSSFEGVLYCKPHFDQLFKRTGSLDKSFEAIPRASRNDKMHENENRTPSRVSALFSGTQDKCVACGKTVYPIEKVAVDGTSYHRPCFKCCHGGCVISPSNYVAHEGRLYCRHHSSQLFREKGNFSQLSKATPTKGVTENSDTDDK

SEQ ID NO: 1044 - protein, 121 aa, Pinus radiata
MVKPLPKQSSPSGSENCQIKSRQFKGIRLRKWGKWVSEIRMPNSRAKIWLGSYDSPEKAARAYDFALYCLRGSKATFNFPDSPPEIPCASDLSPPQIQAAAARFATEDFRLPSEEDAASSS

SEQ ID NO: 1045 - protein, 131 aa, Pinus radiata
MEIRLQQENDQDIAPPHEDRVSRQFKGVRPRKWGIWVSEIRMPRSRQKIWLGSYKKPEQAARAYDAAVYCLRGSNAKFNFPNSVPDIPSASSLSRQQIQLAAAKYALDQSPSSPPSLNNNKEEPASPSQSS

SEQ ID NO: 1046 - protein, 102 aa, Pinus radiata
MTQQTTSPTVSPAALALPTSASSTSAKSAAVPVPAQANPRKRPRSDLSAEEKREARAHRNRIAAQNSRDKRKQQFTSLEQRVIDLENENRQLRDALATSQPN

SEQ ID NO: 1047 - protein, 66 aa, Pinus radiata
LLTIFEAVYVHKGIVNAAKVLNLTPSAISQSIQKLRVIFPDPLFIRKGQGVTPTAFAMHLHEYISQ

SEQ ID NO: 1048 - protein, 106 aa, Pinus radiata
MKGPQGISNAQNTCTKFRMPTSENLIPIRLDIEIDGLRLKDAFTWNVNDPDSEIHLFARRTIKDLKYPGSFITPVVQSIQAQLAEFRSFEGQEMNTGQKVLPLKLP

SEQ ID NO: 1049 - protein, 134 aa, Pinus radiata
MEGSQNGSSNAPPPFLTKTYDMVDDPATNAMVSWSPGSNSFIVWNPTEFSRVLLPTYFKHSNFSSFVRQLNTYGFHKIDPERWEFANEGFLRGHRHLLKNIHRRKPVHSHSQQKGESLSGGSCVEIKQLEDETE

SEQ ID NO: 1050 - protein, 220 aa, Pinus radiata
MVLYELLHVQQIQQIQQQQFQLQQQQIAAAASIHHMGRNPLGPRDQPMKLHGSSLSKPAKLYRGVRQRHWGKWVAEIRLPRNRTRLWLGTFDTAEEAAMAYDKAAYRLRGDYARLNFPHLKHHLEANSFAPWTGNSVLPSSVDAKLQAICQSLKQPLESMSKTEESEEISCAYENSGSLGSVRDEDAKKNDVVSVKSETCDSDSSDDSTITALNSSGDQN

SEQ ID NO: 1051 - protein, 219 aa, Pinus radiata
RIEAPGRRTNPAAVTWAAAHFSVKEQDRFLPIANVGRIMKKALPANGKVSKDAKETVQECVSEFISFITGEASDKCQREKRKTINGDDLLWAMTTLGFEDYVEPLKIYLHKYREMEGEKVSMAKQGDPTPSKEGNNAINGSSIENPNANAYSGLNPGGYNRVQSQSLPHMQQAAYGQPPGGMVYGHHGHIMGAYNMTAPNSSGGNSSGQQQQQAPRGQW

SEQ ID NO: 1052 - protein, 100 aa, Pinus radiata
GCTTVVETLAKWQELNSQVESSKDGAKRLRKAPAKGSKKGCMKGKGGPDNGRCNYRGVRQRTWGKWVAEIREPNRGSRLWLGTFSSAEEAARAYDQAARV

SEQ ID NO: 1053 - protein, 117 aa, Pinus radiata
MEIVGKAKEDVSLPKATMTKIIKEMLPAHVRVTRDAQDLLVECCVEFINLISSESNDICYKEEKRTIAPEHVLESLKILGFGSYIREVKAAYEQHRIENWDCPRAGTRWSKNRLEMT

SEQ ID NO: 1054 - protein, 161 aa, Pinus radiata
NINGVAGGVAKEKKVNFPWCALEKQVGTSSFDPNLASSKQAMDSLIMQQLPTFLQYCKDLEEGRQSWFMHKKEATWRLSRLEQQLESEKARKRREKIEEVGSKIRALREEEITYLDKLETECREQLSSLQRDAEMKEAKMMELWATKHLQLTKFVDSALSV

SEQ ID NO: 1055 - protein, 396 aa, Pinus radiata
MARETNSFALLGGDDDQGDDDLMALINSAATLKPEKKPKTTAKKNGQQQPPPPQSQPAKLPSKPLPPAEAVRADRGRGRGGRGRGGGRGSRFEGGEYNTESNGYGGGGGFGGGRGWGRDEDSGNRGWGREEDTGGRGWGRSNGEEDTGGRGWSRSNGEDDAAAGGGQSRGRGRGRGRGRGFGGRGSGRFGGGGDSYGYDANGQDRPPRQQFEDTNTFTGTDNWDTPEVSVVDEAKNVEPEQKKPEEEATPGVTSENKDNKEEEDNEMTLDEYEKLLNEKRKTLEALKNAERKVILDRDFEKMQLVDKKNDGIFIKLNSEKERQRKKETLEKEERARKSVSINEFLKPADGERYFTPSGTRGRGRGRGRGRGDGVSTRGGFGGRYSDADQVAAPCIE

SEQ ID NO: 1056 - protein, 120 aa, Pinus radiata
TWAQEEEKSPRAIGGEKGGRGLRQFSMKVCQKVESKGRTTYNEVADELVAEYANPNSALISPDQQQYDEKNIRRRVYDALNVLMAMDIISKDKKEIQWKGLPSTSPNDLEDLKAKRMGLR

SEQ ID NO: 1057 - protein, 78 aa, Pinus radiata
PMKLYRGVRQRHWGKWVAEIRLPRNRTRLWLGTFDTAEDAALAYDHEAYKLRGENARLNFPHLFLNKGSTSPKACSVA

SEQ ID NO: 1058 - protein, 171 aa, Pinus radiata
SFSCRIRHQTEPTLILIDTAGCDMEEKKDDEDSTMNEGEATVTLMHAKKLLESGVNPSDIGIITPYAAQVGLLKIMRSKEMKLKDLEISTVDGFQGREKEAIVISMVRSNAKHEVGFLNDRRRMNVAVTRARRQCCIICDTETVSSDKFLKRLVEYFEEHAEYLSASEYLT

SEQ ID NO: 1059 - protein, 94 aa, Pinus radiata
EKCSDQVSGSTSSCRIRHELGYSRSAKRCKEKWENINKYFRKAKESNKKRPENAKTCPYFHQLDALYKKRNLGNRHNKIMVLSIFSVASTGLFM

SEQ ID NO: 1060 - protein, 174 aa, Pinus radiata
MAPSNNRRDDNGARGVHFRGVRKRPWGRYAAEIRDPWKKVRLWLGTFDTAEEAARAYDTAAISLRGPKAKTNFAYSSPSSSSSLHNNQSSSQNSSTVESWPSAAPVTRSGDLELPASFLPRLGVSTGRRVLNGGNPRSGRRRSLSEKNSGRKAEGAEARTTLSDSDSSSSAVLD

SEQ ID NO: 1061 - protein, 121 aa, Pinus radiata
MGPLMGSPLGGGLGLSPRMGGGIGNGLQGGLGVGLAGLGATALTIGAASPANQLSSDGMGNSHGDNSTVSPIPYGLDVSVRGRKRGGPVEKVVERRQRRMIKNRESAARSRARKQAYTVNW

SEQ ID NO: 1062 - protein, 145 aa, Pinus radiata
ETRGGSSGDFLPPPPTTKCSEELQNKITKYIALKSAGRSFNKELRNSKGYRNPDFLQRAVKYQGIDQIGSCFKKEIFDPHGYDPSDYYDALALELKREFERREQEKQKNQRVDFVHGAVQTTSVQSVSKPIVQVMGGQKVPVVGV

SEQ ID NO: 1063 - protein, 236 aa, Pinus radiata
MSSPQSNKWLSYFDEPLLDDVGVGQPANPFFWCGQGINDQPDVSVEIDGPNKDMDEQDKLCPRKRSREESSGGPGSKACREKMRRDRLNDRFMELSSVLEPGRPPKTADKATILSDAARVMTQLRTEAQNLKAENERLQEAIKDLKAEKNELRDEKLRMKAEKEKLDQQVKAMALPTGFVPHPAAFHAAAAFAAQSQAAANKTMPVPGYPGMAMWQWMPPAVVDTSQDHVLRPPVA

SEQ ID NO: 1064 - protein, 145 aa, Pinus radiata
MGSRTMLSSNGGRTPQFQPLVRQNSLYNLTLEEVQNQLGDASKPLSSMNMDELLKNIWTQEESQAISMAIGNGPMNGVPPNSAPASGGLQRQGSLTIPRTLSRKTVDEVWRDIQQSQGKSNEEKKPQQRQSTFGEMTLEDFLVKA

SEQ ID NO: 1065 - protein, 171 aa, Pinus radiata
MASGNVDPDQWEFANEDFLRGQRNLLKNIHRRKPMHSHSQNPQQGVCNDAIKYELEEEIQRLKRDKGLLMMELVRIRQQHQGTEMHMQTLEERLQAMEHRQQQMMAFLAKAVQKPGFVAQLVQQSENNKLLEAANKKRRLPKQENCSEAGETELTDSQIVKYQPASGDECS

SEQ ID NO: 1066 - protein, 112 aa, Pinus radiata
VAAASASASGTAVAASLPVNGAAGVRSSVDSEHSDIEASFKEAECSQAIVERRPRKRGRKPANGREEPLNHVEAERQRREKLNQRFYALRAVVPNVSKMDKASLLGDAISYI

SEQ ID NO: 1067 - protein, 73 aa, Pinus radiata
LYAEESSTVTHLQYQQSILENDLRSKLKDNLQQPQNSGKKRRYRGVRQRPWGKWAAEIRDPKKAARVWLGTFD

SEQ ID NO: 1068 - protein, 203 aa, Pinus radiata
NMAKHTVCASFLNEGDFICPPYEDGIGLEWLSDFVEDSFAATGSSNSGSLADLSKDKIDDNREKKKQNPTDEAIIPEIPPIKETPRSQRAVPGRARSKRRRSSGAPIRGWSTSEDYALQNEGGMKTVTGADAINHYQSSAPQQQPRRCTHCLSQRTPQWRLGPLGPKTLCNACGVRFKSGRLFPEYRPAKSPTFIRYIHSNSH

SEQ ID NO: 1069 - protein, 190 aa, Pinus radiata
GNAARRPHDVLLKLEKLSSQTTLESLQRLIVQKKCLLFGKKVGIRIDGKKTANTEKVNERNTIPRIIFGALTFTRNRPHALSKNGSIADTRRNICGAPQEDGTICTAIPLKSRKRCPDHKGQKGQKEKNLSKINISANVESRNQGVGEHENEYRYCGVLLKDGSTCKIIPDKGRKRCNIHKGMRIPGQAK

SEQ ID NO: 1070 - protein, 81 aa, Pinus radiata
MATSNPFDLLGDDDNGDVSQLVFVPQEKPTVKKASQPAQTATAKLPSKPLPPAQAVRESRNGVGRGGRGGRGGDRNQDVGY

SEQ ID NO: 1071 - protein, 154 aa, Pinus radiata
MNREKLMKMAGAVRTGGKGTMRRKKKTIHRTTTTDDKKLQSTLKRIGVNAIPAIEEVNIFLEDSVIHFQNPKVQASIAANTWVVSGSPQTKRLQDLLPGIINQLGPDSFANLRKLAQQFQKEVPHPAVEEDDDDVPELVEGETFEEAAKQESAA

SEQ ID NO: 1072 - protein, 63 aa, Pinus radiata
MPHQHQHQERFPSQEGISWKRDDELPQPQNPPKKKRYRGVRQRPWGKWAAEIRDPKKAARVWL

SEQ ID NO: 1073 - protein, 331 aa, Pinus radiata
MGQIGGPHGYPNSSPSAQDALYEELWHACAGPLVTLPRIGERVFYFPQGHMEQVEASTNQGADQHMPLFNLPYKILCRVINVQLKAEPDTDEVFSQITLLPEAEQDESSVEKEPLTPLPPKPLVYSFCKTLTASDTSTHGGFSVLRRHADECLPPLDMSQQPPSQDLVAKDLHGVEWRFRHIFRGQPRRHLLTTGWSVFVSSKRLVAGDAFIFLRGENGELRVGVRRAMRQQNNVPSSVISSHSMHLGVIATASHAVTTKTMFSVYYKPRTSPSEFIIPYDQYMESMKINFSVGMRFKMKFEGEEVPEQRFTGTIVGISDADPVNWPNSKW

SEQ ID NO: 1074 - protein, 113 aa, Pinus radiata
MTQATNYTAGTIRDDQEEQCVRRGPWTVDEDMSLIRCVTTRGEGRWNTVAKFAGLKRTGKSCRLRWLNYLRPDVKRGNITPEEQLLILELHRLWGNRWSKIARQLPGRTDNEI

SEQ ID NO: 1075 - protein, 44 aa, Pinus radiata
MAENYGSPDSSPRSENESGGGHMGGSDFSVKEQDRFLPIANVGR

SEQ ID NO: 1076 - protein, 282 aa, Pinus radiata
MPMLAETYRDSFETTSGGSSVDLVGMALPGLAPNLSSASVSASASEDSAKKIRKPYTITKSRESWSEQEHDKFLEALQLFDRDWKKIEAFVGSKTVIQIRSHAQKYFLKVQKNGTREHVPPPRPKRKASHPYPQKASKNVPVSQQVSTAFPTAATQLDSGYYPRAESSSILTKSGSSCPTVSSWVHHTIPSIDASFVEKDDGGPPGIETGNNCSSGSTESSPPTWPPCSEIPEKVKPDFSQVYKFIGSVFDPSTTDHLKKLKEWIQLILKLCCTHEEPFHNL

SEQ ID NO: 1077 - protein, 104 aa, Pinus radiata
MGRSFSCWSCSKDNGHERLNRGSWSAEEDTILSEHIKTHGVGRWTSLPKKAGLKRSGKSCRLRWFNYLRSDIKHGNISPEEEELLIRLHRLLGNRWSLIAGRLP

SEQ ID NO: 1078 - protein, 93 aa, Pinus radiata
MDRDKLMKMAGAVRTGGKGTVRRKKKAVHRATTTDDKRLQSTLKRLGVNTIPAIEEVNIFKDEMVIHFINPKVQASINANTWVVSGSPQTKNL

SEQ ID NO: 1079 - protein, 118 aa, Pinus radiata
MDRDKLMKMAGAVRTGGKGTVRRKKKAVHRATTTDDKRLQSTLKRLGVNTIPAIEEVNIFKDEMVIHFINPKVQASINANTWVVSGSPQTKNLQDLLPGIINQLGPDNLINLKKIAQQ

SEQ ID NO: 1080 - protein, 191 aa, Pinus radiata
DDEEEASLKGKVRWGLDSIAALGLKFIKRALAKKKTVGIAGGADRVLLSGRMKLKPKGLMCVFCGLLRVRGNGIIGVKVFLEKYAGSSQQEILRVEISLSFAFQNEDRLLPAASGRGKEESQFRAMACMCWATCVPTCCWEPCCIFSSRSQAGGCLNKQEVDAHIPNYPNLPPQLICHYTMLLCRQMWRQM

SEQ ID NO: 1081 - protein, 86 aa, Pinus radiata
IDSSEKRLKGKNYIDITTERAAQEPGCIMARPQRYRGVRQRHWGSWVSEIRHPLLKTRIWLGTFETAEDAARAYDEAARMMCGPRA

SEQ ID NO: 1082 - protein, 119 aa, Pinus radiata
MVRSPCCDKVHTNNKGAWTKEEDERLIAHIEAHGEGSWRSLPKAAGLLRCGKSCRLRWINYLRPDLKRGSFSEEEDDLIIKLHSLLGNKWSLIAGRLQGERTTKIKNYWNTHMKRKLLS

SEQ ID NO: 1083 - protein, 128 aa, Pinus radiata
MGRSPCPPKEALNRGAWTGMEDTILTEYIRVHGSGGWKDISKRAGLKRCAKSCRLRWLNYLRPDIKRGNISPEEEELIIRLHRLLGNRWSLIAGRLPGRTDNEIKNYWNTHMSKKPWLSMDESQSNTS

SEQ ID NO: 1084 - protein, 126 aa, Pinus radiata
EEEDEEEAGKELEAWERAYADERSWETLQEDEEGLLNFDKKQQQQQQRQYRRRLQSAAAAASNIQRGLIRYLYIIIDFSRAAAEKDFKPNRMVVVANCVEAFVREFFDQNPLSQLGIVIIKNGVAH

SEQ ID NO: 1085 - protein, 139 aa, Pinus radiata
RAPCCEKTHTNKGAWSKDEDEALVAYIQAHGEGSWRSLPKAAGLQRCGKSCRLRWINYLRPDLKRGNFSPEEDEIIIKLHSMLGNKWSLIASKLPGRTDNEIKNYWNTHIKRKMLERGLDPSTHLPLMSDHGSFESSSK

SEQ ID NO: 1086 - protein, 189 aa, Pinus radiata
KVVPPLDFTQQPPAQELTARDLHDNEWKFRHIFRGQPKRHLLTTGWSVFVSAKRLAAGDSVLFIWNEKGQLLLGIRRANRPQAVMPSLVLSSDSMHIGLLAAAAHAAATNSRFTIFYNPRASPSEFVIPLAKYVKAVYHTRVSIGMRFRMLFETEESSVRRYMGTITGISDLDQVRWPNSHWRSVKVGW

SEQ ID NO: 1087 - protein, 132 aa, Pinus radiata
WEFANDCFRKGEKQLLCEIHRRKSVQQSSAAPASRCVSPVNSVEEQALSSTSSPVSSHAEAALVNCGQNSTSGLHGENEKLRKDNLLLMSELAQMKKQCNDLLLFLSKCVNITPDNLSNILIAASQTNCRDE

SEQ ID NO: 1088 - protein, 214 aa, Pinus radiata
GKWGVPDNLYGAQEDSGGSSVKQKNLKDGDQFTSSDEADSEVNEFNIMKRSNSGVGYEDNKRSGGQGDGNQYRSRHSRSISMDSIMSKMHNFSEDLEQEPSQGRNVRHSHSNSMDGSTNFNVEFGNGEFSASEMKKIMASEKLAELATVDPKRVKRILANRQSAARSKERKMRYISELERKVQTLQTEATTLSAQLTLLQRDQLDWAVRTTSSS

SEQ ID NO: 1089 - protein, 97 aa, Pinus radiata
MADGHQFNNILLVGRGGTNPGQLRIHSGGIVWRRQGGGKVVDVAKNEVKSLSWTRVPRGYQLGVKLKAGLNIKLAGFREQDVGNLTNFMTNTIGLAP

SEQ ID NO: 1090 - protein, 108 aa, Pinus radiata
MGDHSGGESSPHSDIESTGIHNNGSSSSSQSIIREQDRLLPIANVGRIMKKTLPTNAKISKEAKEIMQECVSEFISFVTGEASDKCHKEKRKTINGDDILWAMTTLGF

SEQ ID NO: 1091 - protein, 90 aa, Pinus radiata
RNIQRNEYHNLFNFISSKGLKIMNLGDAHGTSGVAAVLENSDDEAVDPHLERIKSAREGGAGEDSDEEACYTGDLSLICAVVKELICTHD

SEQ ID NO: 1092 - protein, 133 aa, Pinus radiata
MGCVSSKVENEELVKRCRDRRRLMKQAVNSRHNFAAAHIAYLRALQNTGNALVQFAEGESSAMNGNAIEEAATPMPATPLTASHRHPMKFHPPPPPPPPPLVPSSPSVSPSMESFRMPSKHNPLSRSTSDISY

SEQ ID NO: 1093 - protein, 148 aa, Pinus radiata
MGRAPCCTKVGLNKGAWSAEEDSLLGRYIQTHGEGNWRSLPKKAGLRRCGKSCRLRWLNYLRPCIKRGNITTDEEELIIRMHALLGNRWSIIAGRVPGRTDNEIKNYWNTNLSKKLAVRGIDPKTHKKITTDGTNRVNGDRFSQRKGE

SEQ ID NO: 1094 - protein, 107 aa, Pinus radiata
RQLIRELEQMFNIEGELEDPSKGWQVVYTDNEGDMMLVGDDPWQEFCSIVRKIYIYTREEVEKMTPQTPSANSRDVQKSLSQEETSRSSDRQDSSIAGVTAERSSDA

SEQ ID NO: 1095 - protein, 275 aa, Pinus radiata
MSNGRLCEDLDRIKGPWSPEEDASLQRLVQKYGPRNWTLISKGIPGRSGKSCRLRWCNQLSPQVEHRPFTPSEDAAILQAHAQHGNKWATIARALPGRTDNAIKNHWNSTLRRRCRDPKKGIVVHLDDEISSLDAARKRSSDGFSHDGSSALEDNGCSSWEVDSKRLKRLGELGTEQGPEVEAEVEVSDRSDANPGRVLYRPVPVVSFFSSFGKTVANLQETAAGAVGVDPPTSLSLSLPGLDPAIPSPKLSTQKDSHNNSTVNNNIPIPPVVNT

SEQ ID NO: 1096 - protein, 128 aa, Pinus radiata
EFGRSSEKGRGYGRGRGRGGRGGYGNDAGDESQRPRRQYERRSGTGRGYEVKREGAGQGNWGTPTDQGFTEEPEELSRAEEEKTVTPEKQEEQKPSEESNQEIPAPESEEKKEEEEDKDMTLDEYEKV

SEQ ID NO: 1097 - protein, 135 aa, Pinus radiata
AVNSSLSVGMRFKMRFEGEESPERRFTGTIIGMGEVDNVRWPESKWRSLKVQWDETSVVPRPERVSPWEIETFVASSAALNPLPAPRTKKPRPNLVSSSQELMIHGSGKTATDSSQVHRLPRVLQGQEMRTFGGS

SEQ ID NO: 1098 - protein, 46 aa, Pinus radiata
AKSCRLRWLNYLRPDIKRGNISPEEEELIIRLHRLLGNRYVENRGT

SEQ ID NO: 1099 - protein, 113 aa, Pinus radiata
MGRSPCCSKEGLNRGAWTKREDMILSEYVRIHGDGGWRNLPEKAGLKRCGKSCRLRWLNYLRPDIKRGNICPAEEELIIRLHRLLGNRWSLIAGRLPGRTDNEIKNYWNTHLS

SEQ ID NO: 1100 - protein, 148 aa, Pinus radiata
PYLHESRHLHAMKRARGCGGRFLNTKKLEDSKANVDNGKTPEGHTAQAGSSSGSEVLQSENGNGNSTQELHGACGMSGSQVTSIAQSSENGTTYQYSHTNGAYLNHYQHPHFHISAFHPLSSGGEEGSSAKGGSIISGGSQQRVVVIQ

SEQ ID NO: 1101 - protein, 48 aa, Pinus radiata
MGRSPCPPKEALNRGAWTGMEDTILTEYIRVHGSGGWKAISKRAGECQ

SEQ ID NO: 1102 - protein, 191 aa, Pinus radiata
VTRPGKFRSCQDGYAVRASLKAEDGVLYPLEKSFFFLPKPPTLILHEEIEYLEFERHGAAGTSSMSSHYFDLIIKLKSEQEHQFRNIQRNEYHNLFSFINTKGLKIINLGATETIGGVAAALQNSDDEAVDPHLERIKIYVMVELVLKTATKRMKTLLQKTMMLDLQQMSQKKRDQMQVRVQRSSNLQRKK

SEQ ID NO: 1103 - protein, 106 aa, Pinus radiata
MSPPPSYSMFPNSGMGLNPSVTSSEPSSQVSGSIPHQYSGSEEDPKLTIDERKQKRMLSNRESARRSRMRKQQHLDELRARTAHLRAENSHMLTKFNIASQKYMQL

SEQ ID NO: 1104 - protein, 162 aa, Pinus radiata
RGQPRRHLLTTGWSVFVSAKRLVAGDAFIFLRGENSELRVGVRRVMRQQSNMPSSVISSHSMHLGVIATASHAVTTRTMFTVYYKPRTSQSEFIIPYDKYMEAVNSNLSVGMRFKMRFEGEEAPERRFTGTIIGIGDVDPSRWPSSKWRSLKVQWDETCAIP

SEQ ID NO: 1105 - protein, 115 aa, Pinus radiata
MAQSEEQPNEATVPRPADSHRSIPTPFLMKTYRLVDDPSLNDIISWNEDGTTFIVWRPAEFARDLLPNYFKHNNFSSFVRQLNTYGFRKIVPDRWEFANEFFRRGEKKLLCEIHR

SEQ ID NO: 1106 - protein, 37 aa, Pinus radiata
MGRAPCCTKVGLNKGAWSAEEDSLLGRYIQTHGEGNW

SEQ ID NO: 1107 - protein, 187 aa, Pinus radiata
TRSGSKNSARAPVSGFSMNSNMGVSGGLDESGFSQPPPNFAKMNAPTRTFTKVYKLGSVGRSVDVTRFRGYPDLRAELDRMFGLEGQLENPRSSWQLVFVDKEKDVLLLGDDPWEEFVNNVRFIKILSPPEVQQMSQEDMEFWSSIPTQQQTSSSSDDCVARNSSRNIRSVLTSPGSLDVLSVDPIV

SEQ ID NO: 1108 - protein, 130 aa, Pinus radiata
HDNEWKFRHIYRGQPKRHLLTTGWSVFVSAKRLSAGDAVLFIRNEKGQLLLGIRRANRSQTVMPSSVLSSDSMHIGVLAAAAHAASTNCRFTIFYNPRASPSEFVIPLSKYEKAVYHTRVSIGMRFRMLF

SEQ ID NO: 1109 - protein, 81 aa, Pinus radiata
MGRTPCCEKGHTNKGAWTKEEDDRLIAHIRAHGEGRWRSLPKAAGLMRCGKSCRLRWINYLRPHLKRGNFSEEEDEFIIKL

SEQ ID NO: 1110 - protein, 146 aa, Pinus radiata
MGRAPCWDKMGVKKGAWTLDEDKILVDYITKHGHGNWRALPKQAGLLRCGKSCRLRWTNYLKPDIKRGNFSPEEEDQIIKLHELIGNRWSTIASYLPGRTDNEIKNVWNTHLKKRLARMKADSVAVDAQPTPASSLASSTTEMTCH

SEQ ID NO: 1111 - protein, 72 aa, Pinus radiata
CIEANGGGAPGRSLPKAAGLQRCGKSCRLRWINYLRPDDVKRGNFTEEEDDLIIKLHSLLGNKWSLIAGRLP

SEQ ID NO: 1112 - protein, 112 aa, Pinus radiata
MRRLRCEKGNTNKGAWTQQEDARLIAYIRAHGEGGWHSLPRAAGLLRCGKSCRLRWINYLRPNLKRGNFSEEEDDLIIKLHNLLGDKWSLIAGRLPGRMEDQIKNYWDTHFK

SEQ ID NO: 1113 - protein, 148 aa, Pinus radiata
GKEVHIAEPDQVSDPPKAIKYEPPAVSCDQEKPLQKLSKETQVKQHGNPTRSCTKVHKQGIALGRAVDLTKFEGYEELICELERMFNIEGELRNPSKGWQVVYTDNEGDMMLVGDDPWQEFCSIVRKIFIYTREEVEKMTPQKHAKLQ

SEQ ID NO: 1114 - protein, 273 aa, Pinus radiata
ETQSSDNNYMVGFVLANVVGLQYYTGTINGREMIRLVREPENRYDPNAIKVLNMSGQQVGHIERAVALALASHVDQSLILIEGIVSRALHKGAYKLPCQIYIFSHRDSMGMVLQLLKGAGLNVITAEDQEFLTAESIAAKEIYEDPGVKEVRRVDDIFGSLNNPKKRQSMEACELVTSTLLQHQKEALAWMVQRENSSELPPFWDVCDKTSKSQQLRYKNVLTNFETNGRPKPLRGGILADDMGLGKTLSLLSLIATNRPGAKLPPVVDIAPS

SEQ ID NO: 1115 - protein, 129 aa, Pinus radiata
LIPQHNAFSLELRFSDRQLPSSTPPNCDSMFPSHYTALALRRQMWRNPRESGQSHSQPPEKDRGKTFGQFKGIRMRKWGKWVSEIRMPRSKERIWLGSYKTVEQAARAYDAALYCLRGPNAKFNFPNSV

SEQ ID NO: 1116 - protein, 90 aa, Pinus radiata
MDREKLMKMAGAVRTGGKGTMRRKKKTIHKTATADDKRLQSTLKRIGVNNIPAIEEVNIFKDDHVIHFANPKVQASIAANTWVGSGHRKQ

SEQ ID NO: 1117 - protein, 33 aa, Pinus radiata
GKTQMKLKRERDQQARDASKRRNGLLKKAYELS

SEQ ID NO: 1118 - protein, 107 aa, Pinus radiata
MGRAPCCANGDRSKGAWTKEEDDRLTQYIQAHGEGCWRSLPKAAGLLRCGKSCRLRWINYLRPDLKRGGFSEDEDDLILKLHALLGNKWSLIAGRLPGRTGHQNQNY

SEQ ID NO: 1119 - protein, 112 aa, Pinus radiata
RKSNVHSFCKTLTASDTSTHGGFSVLRRHADECLPPLDMSQQPPSQELVARDLHGMEWRFRHIFRGQPRRHLLTTGWSVFVSSKRLVAGDAFIFLRGESGELRVGVRRAMRQ

SEQ ID NO: 1120 - protein, 156 aa, Pinus radiata
ALREAIKNGACPNCGGSTSLGEMPGFDEHHFRIENTRLKEELDRVSGIATKYIGRSMPHLAPIATPPMLMSSLELAMGSFGGKQSQPAAPSVDFISGPLADGPIINCGTLTDLDKPLALELAMNGVEELIRMAQTDEPLWLKDVNAGSVKELFELG

SEQ ID NO: 1121 - protein, 116 aa, Pinus radiata
GFFIFMCRLPGRTLANGRLIWLCQANEADSKVFPRALLAKSASIQTVVCIPLADGVLEFGTTEVEREDPGLVQRTISFFLEYPKPICSEQSTSSPQCSDRDEKDQVGMVTIMSSDS

SEQ ID NO: 1122 - protein, 104 aa, Pinus radiata
FLFDSLDAVNINMEAVHKIEKFLLAPKIDATISSAAAPPWKTLFAAAGFSPVAFSNFTETQAEYLIQRLHSRGFEVEKAHAALLLGWQGRPLVSATAWRCGPPP

SEQ ID NO: 1123 - protein, 169 aa, Pinus radiata
EEKQLSISGRNWGEVNLEGNMLTFLVGSKPAFEVSLADVSQTQLQGKNDVVLEFHVDDTTGANEKDSLMELSFHIPNSNTTFAGDEASPPAQIFREKIMSMADVGSSGGEAVALFEDIAILTPRGRYTIELHLSFMRLQGQASDFKIQYSSVLRLFVLPKSPHTLVVIT

SEQ ID NO: 1124 - protein, 124 aa, Pinus radiata
LGHSQNFSTDVNRMPDVPPRRGGHRRAQSEIAFRLPDDIMFDGDLGFAGFDMPTVSDDATEAEDLISMYMDMEKLTSFGEPLNSAAGEGSKLPSGAETNRPPHHSRSLSVDAVFSGFEGNMEDT

SEQ ID NO: 1125 - protein, 70 aa, Pinus radiata
MDRSSSEDSVDSQGDVNANYKMVFSEDEKDLISRLYNLLGQRWALIAGRIPGRTAEEIEKYCSRRYISEY

SEQ ID NO: 1126 - protein, 120 aa, Pinus radiata
GGEIRILRGFFVNQKTDGQGSSFAASSSRNSSFSNGYDNPQNTNKNSSSGGTGDAGSFECNICLELAQDPIVTLCGHLFCWPCLYKWLHGHSKSQECPVCKALVEEDKIVPLYGRGKVGS

SEQ ID NO: 1127 - protein, 233 aa, Pinus radiata
MGAPKQKWTSEEEGALKAGVEKYGTGKWRTIQKDPEFGHCLAARSNVDLKDKWRNMSVSASGQGSRDKVKTPRVKAIASLPYSSVTAESTSVFSIEATTSTTPDNLISPKSSSNGKIHSPRYDGMILEALTSMQDPNGIDIATIASFMEERHELPPNFKRALGTKLRRLVAQEKVIKIRNSYKLKDMTSTEVTSEVLGSAIPIDNSMQYSNAFTNTIDTFSVDRVNEASMAAA

SEQ ID NO: 1128 - protein, 144 aa, Pinus radiata
HSRPLIKEEAESGDNSANSADVETLLPQVDETASADLTVFPGFVTPYVPYGFPIWHTFRPTITQTSNVYKPTAVMPTAPIKMDECTGLSQLSLGGVAAASAMKPSELSLKLHGRPPSRQSAFQAKPSLNESSSLSSSSNVISVV

SEQ ID NO: 1129 - protein, 187 aa, Pinus radiata
HPYMWGGQPLMPPYGTPLPYPAMYPHGGIYAHPSMPPGALPYGHYGMPSPGNAEVTTTLALPNAEAEAKSSEGKERNTMKRSKGSLGSLGMITGKGGEGGKATSGSANEAMSQSGDSGSDGSSEGSEEYNTQTESQVARKRSFDQMIVDGANAQSTNIQSYNSQAGEPYVTSGGHAMGNPISQAVAA

SEQ ID NO: 1130 - protein, 80 aa, Pinus radiata
GKVTASGKVTSGVNDLFWEQFLTETPGSATDTQEAESKIQETRTKDQDERLPENGKCWSNKQTLDQLTEQMGQLASGTQT

SEQ ID NO: 1131 - protein, 96 aa, Pinus radiata
MNMDSRQSGEEEDCNVTRPGGGGGISLHVSSVEYCQKSACVAHDISSDEQDLINRLHNLLGDRWALIAGRLPWRRREEIENYCKMRYTATTSSSRS

SEQ ID NO: 1132 - protein, 193 aa, Pinus radiata
ERERGRKPANGREEPLNHVEAERQRREKLNQKFYELRAVVPNVSKMDKASLLGDAAAYIKDLFSKQQDLESERVDMQVQIDTIKKELLMNSLKLAAKEAKDLSSIDLKGFSQGKFPGLNSEVRIVGREAIIRIQCTKHNHPVARLMIALQELDLEVLHASISTVKDSLIIQTVIVKMTRGLYTEDQLHALLCK

SEQ ID NO: 1133 - protein, 88 aa, Pinus radiata
MAYNRKHAAAATSPDSSLGSDNESGGGGGGGGGKGQSTKNGNGNYIREQDRLLPIANVGRIMKRALPGNAKISKDAKETVQECVSEFI

SEQ ID NO: 1134 - protein, 141 aa, Pinus radiata
MATRNPFDLLEDDDNGDPSSLLDTLAAAKDKPAAVAAKKQQPAVSASGKLPTKPLPPAQAVKESRVSPNEGGRGRGGGRGGRGFGNRESQEFGRGRGGGYNVERNFNRENNAYSGSRVGFYDNNSDLIPSRNEDGDGASND

SEQ ID NO: 1135 - protein, 43 aa, Pinus radiata
MPRVKLISRNFMDMVAALPAAKLDRLYDKSLHLRSGLRSLTPV

SEQ ID NO: 1136 - protein, 48 aa, Pinus radiata
MAEEMDTPTKTTKTPTSQEQTSTSTPVAYPEWAAPIQALYNSGKTPLP

SEQ ID NO: 1137 - protein, 190 aa, Pinus radiata
SFSSTRESMERRDQSPVAARHPMRKHYRGVRQRQWGKWVAEIRLPQNRTRLWLGTFDTAEAAALAYDRAAYRWRGECARLNFPHLFSKKYQNSSPSSTNGRIPRLSCEKSDQKYAYNGDPVHTNVYKGPPIRITAYNGDPVPIDVYRSDPVRVSAYTGDPVRISAYSGDPVGNTVTLAESELESSCSHES

SEQ ID NO: 1138 - protein, 177 aa, Pinus radiata
LDYMEEQNWDINGAKYDGSEKWKAHSSEQKDLGTIPTKVEGRIGNRENSLDVTRGGALWDIFRREDIPKLQDYLLKHCQDFRHSRNVSVDSVVHPIHDQTFYLNEGHKKKLKEEYQVEPWTFEQHLGEAVFIPAGCPHQVRNLKSCIKVALNFVSPENLQECIRLEDELRLLPKNHR

SEQ ID NO: 1139 - protein, 148 aa, Pinus radiata
GPREMTEEERETKKAASVAATAADQELRKKVLRDLHALINPNATGEADPAEFPGDDATVDGEVTDAEWFYLVSMMKSFGNGLGVPGQAFCGGMPIWIIGSEKLQSYNCERARQAQQFGIQTMVCIPTPNGVVELGSTDLNPQNWDLIQ

SEQ ID NO: 1140 - protein, 341 aa, Pinus radiata
MCGGAIIKEFIPANRSRRVTARELWPDFDTFAEFINGGATQETFNKPGKLDEGCKQKSKPSKGSVKTQQEFCSGFEGGRSEVIPPLEDVEGSTPTIGGRKRKNVYRGIRQRPWGKWAAEIRDPSKGVRVWLGTFNTAEEAAKAYDAAAKRIRGKKAKLNFADNSCSVKNDTSKKLSGKKGKLCSKHPALLLEGFNASCKVKPSYSANPDLLGGYNINRKVKASLSGVGKSDLTICGYDDMEYGDSGFSKPSAPFQNNSNACTVQFSEHSNLTQTSQKSCSCEICSHNYSEMSNVMPPAYGNAVNFEPVQTSNPGGYFDSDHSSMSFEGAHFPWAQEIKTPE

SEQ ID NO: 1141 - protein, 181 aa, Pinus radiata
AKTLHPCWDAYQLEDERASAVYINVFSGDATTEFPSALQLGRGGILADAMGLGKTVMTISLLLANSGKGGFSGMDTVEPFSANSCSEKTIIHPYNIGVELGPSQYTNKTQGTSMLRRSSSGLHKGGGNLIVCPMTLLSQWKTELETHVQSGTMSVYVHYGQSRTKDVKSLLQHDVVLTTYG

SEQ ID NO: 1142 - protein, 59 aa, Pinus radiata
MFVGMMSEVGSPTSQDSRNSEDGERENCAVREQDRFMPIANVIRIMRKVLPTHAKISDD

SEQ ID NO: 1143 - protein, 133 aa, Pinus radiata
MGFEQTRGGGGGAKMTQHQVVTTELVRQATERLRKLCRTGVKVELRDFFQLCIVLAKSIDSAVVYNQIPTMVHELPQLVRQVFERKDDIRLQPAIMVLMLSVKNACRSGWFRVTDTDELLTMSKELSSRFTST

SEQ ID NO: 1144 - protein, 169 aa, Pinus radiata
MTRKCSHCGNNGHNSRTCPNRGGVKLFGVRLTDGPIRKSASMGNLMMMSNPSSPADPSEPASAAAAAAAAAASGYLSDGLVEASTSSNSRERKKGVPWTEEEHRMFLLGLQKLGKGDWRGIARNFVITRTPTQVASHAQKYFIRQSNMTRKKRRSSLFDMTPVSFFFLS

SEQ ID NO: 1145 - protein, 103 aa, Pinus radiata
VSSRHEFAVSQMAYLQALRNAGATLRQFAELESMELQKTSPYPHLRHYRVTLPPSPPPLPPPPPPPPPLSLTPSPSYGSATFPSSIPVNRSIYRCPYQQCSPS

SEQ ID NO: 1146 - protein, 153 aa, Pinus radiata
QLPDEAIALAAASHIERELQITSWNLSCNFVASTLQGRECIERLEITGIGDPSGRGLGFSYLRVAPKPPISSALVKKKAAAARGGSAVTGTDADLRRLSMDAAREVLLKFNVDEEQIEKMTRWHRIAMVRKLSSEQAASGVKVDATALNKFAR

SEQ ID NO: 1147 - protein, 73 aa, Pinus radiata
MKSPSTSCLSHPVEGEQKSINSELWHACAGPLVSLPSVGSVVYYFPQGHSEQVAASTQKVADTHIPNYPNLPY

SEQ ID NO: 1148 - protein, 213 aa, Pinus radiata
LKVQWDEISAIARPERVSPWKLEPSLTPVAVNPLPVARGKRPRPNILPSSSDLSVHDKAPVDSTQVHRFPRVLQGQEVMTLGGSLGDGELESGQKMVAWGGSKLDDVKAEGMGCQRRLVSENWMPPLRHDSLYSDTFSSFQPVGEVQEFRGSLTNSILEDGQQPKLSRKQFQDQEGKIVDGSGLWSMSFPNSLQLCESNRKMSATSAAQSHKQ

SEQ ID NO: 1149 - protein, 217 aa, Pinus radiata
ELTSDSHRQATLQLEAEVTAWHISFCSLIKSQQDYICALYEWARLSLVQLGNEAQWERGNRPPIYTLCDVWQQVLKRLPDKVASESIKSFISVVHAIVMQQADEQKRKKKAENISRELQKKMIALRNIEKKYYSSYSIPARADATTESQFELGHTDPLAEKRAEIEIYKRRLEDEKANYSKSARGTREMTLNNIQTGLPGLFQALSSFSSVCASSFE

SEQ ID NO: 1150 - protein, 33 aa, Pinus radiata
MAMGEAERITGPWSPEEDTSLHKLVEKSGPRNW

SEQ ID NO: 1151 - protein, 127 aa, Pinus radiata
WRPAKFARNLLPNYFKPNNFSSFGRQLNTYGFRKIVPDRWEFSNEFFRKGEKQLLSEIHRRKGLIQPPPPPENRSISPSNSGDEQTWSSTSSPNSSTGVDALSHKNAIEENEKLRKENLLLVSELTQ

SEQ ID NO: 1152 - protein, 104 aa, Pinus radiata
PHGLQHHSSDDANGDGDKRIGVETGSSVCPELWHACAGPLISLPPKGSRVVYFPQGHLEQIADNELHRGGRGSFLNINHAAAPMAEEASSAAALNIPPSFISQP

SEQ ID NO: 1153 - protein, 146 aa, Pinus radiata
ETLTLLKIRSEMDSKFREATHKGPLWDEVSRALAEHGYQRSSKKCREKFENLYKYYKKTKEGKAGRQDGKHYRFFSQLEALYGGTTIDAADSCFGVTTRTNLTESPGLDFNGDGASQKYADTHHNSEGFSLSSDSSSDDEYSHDIQ

SEQ ID NO: 1154 - protein, 105 aa, Pinus radiata
IFYRLHCNLGEKSNKIYICLFTMELADEHSILRYKKPKLSKNVVSERRRRQKMNKLLYTLRALVPNISKMDKASILADAIEYVEKLKQQVERAESDVQSTNVSAL

SEQ ID NO: 1155 - protein, 83 aa, Pinus radiata
REFNINADVYAQDSIELLKQSGIDFEKNEEKGIDSHRFGELLMSSGVVLNENVNWITFHSGYDFGYLLKLLTCQNLPPEESDF

SEQ ID NO: 1156 - protein, 170 aa, Pinus radiata
MANRSLWGGSDFDYENEADTRKGPWTVEEDMQLGIVNLHGEGRWNFLARASGLQRTGKSCRLRWVNYLRPDLKRSKITPEEERLIIELHRRWGNRWSRIAQSLPGRTDNEIKNFWRTRMKGKLNSETQKDIAGVDADDGVQFESELGSCRLPVISSHALPEVDVAEPSST

SEQ ID NO: 1157 - protein, 119 aa, Pinus radiata
GTVGRKRRRIHRSSIGVTGGRGLRHFSMKVCKKVESKGWTTYNEVASELVAEFVNPNSTHLSQDQQQFDEKNIRRRVYDALNVLMAMDIISKEKKEIRWKGLPTTNLSDIERLKTERKR

SEQ ID NO: 1158 - protein, 97 aa, Pinus radiata
CPRAFARAYNLKTHMATHDPNRLKPHVCPHRSCARSFSRKHDLGRHLVSIHRDDSVVSTPSASMKSIGVDSGRRSWCDNCGKGTIGASCQCSCADIK

SEQ ID NO: 1159 - protein, 162 aa, Pinus radiata
HAPIFCRVARNFQLRVILKENRRRETFDGFLREDHEKVSQLVTQHYKVQLETKEISVKGWNWGSTDVQGNDLAFVVANRTAFEVPLRSITNSNIAGRTEVSLEFSTAPAPSASKSKKGRPDELTEIRFYVPGTHTKDDDDEADITKDDEEVSAAQAFHDMIK

SEQ ID NO: 1160 - protein, 163 aa, Pinus radiata
GSGGVKMEDHSPVIINSQSGYCQSQQSSQMPLAGYMSPHGIPIQHTDDAASKETQYLRRRCFNCHTTEPPSWRRSTLTPGKIVCNKCGLYERTHLRPRPLRFDELRAGNKSRKQTKSSPKGAKVIPPGPLPIKKEPAEMEAISRRMSVSSSSSAQSGGGGSSD

SEQ ID NO: 1161 - protein, 148 aa, Pinus radiata
RNLLGARAQPMKLSAKNDSKLGIARPAKLYRGVRQRHWGKWVAEIRLPRNRTRLWLGTFDTAEEAAFAYDTAAYQLRGEYARLNFPDLRYLLLSNSDNGSHNVLSPPGNALSVLKSSVDAKLQAICQRLSQENSSENRLMAHSANNEA

SEQ ID NO: 1162 - protein, 48 aa, Pinus radiata
FLEALEKREEDRMMREEAWKRQEMARLNKDQELRSQERSMAASRDLAL

SEQ ID NO: 1163 - protein, 255 aa, Pinus radiata
VALSNNPLIFSAKVENGTPSYDGLKHANTNPMPFSGLGNVSMGPLFYQANPIQRVKRVRDTSFIMGPPSSPFGRMGVNGHMGMNDVSKSLQPGFKARVPYPLQAARSDSFVAQGCFPYDPNLSSTSNLPLGGFSSGSHAVMNGTFSSSRLFSGQKLELPSSQFAESVQTAGSSINPVLNRSTPLLLPPVPTQTINQVDYSFSTPKNSGLLESMFQEAQTMGGVKAHSSSNSSIDLQGGSKSSISNPLNNGFLCRS

SEQ ID NO: 1164 - protein, 147 aa, Pinus radiata
IRMEEPLQIINSSPIQQQHDHDDDDHGHGHEEEVIPHPLLPPPGDTCIVPYIMPVSTSTAEKHPPQPTNIAFNGPETEEDDKKRDREHKKRSKNWTRVETLKLIKLRTEFEPRFSRSGRKTELWDEIAESLRKEQFFRDAQQCRDKW

SEQ ID NO: 1165 - protein, 202 aa, Pinus radiata
MDQQQPTIPALPQVGYGTNPYIAPPIGGPPHPQLASYHQQLQAFWGNQMREVEQAQDFKTHSLPLARIKKIMKADEDVKMISAEAPVVFAKACEMFILELTLRSWIHTEENKRRTLQKNDIAAAIGRTDIFDFLVDIVPRDEFKDEGLVIPRAAGAVPFMGPGDNVPSYYYVAQQAPNVAAYAPPTQQMRSKAPAPPPHGSS

SEQ ID NO: 1166 - protein, 143 aa, Pinus radiata
QGSLTLPRTLSRRTVDDVWREIHKENIDGNGNAPANQARQPTFGEMTLEDFLVKAGVVREDAEQGDGQSFGAFRNALDGEFVANLAERNGDNRLGIGNSLGLGFGERGHRNGEVGSNKSGAGGVPGLSLSPTNVFLIMLPWIW

SEQ ID NO: 1167 - protein, 90 aa, Pinus radiata
FQRRKKKSIGRGCLKTSINDVEQLKAEKLLLKSRIEKKASYFHELEEQIIGLQNLVKRNEHRYSSGNTPSGGVSLPFILVQTHPRATVEI

SEQ ID NO: 1168 - protein, 105 aa, Pinus radiata
GIRRATRQKSGILSSVLSNQNAHLSVLAAAASAVATKSMFHVFYNPRTSPAEFIIPYQKYVKSCKQPLSIGMRFKMRFETEDTAERRYTGMITAIGDADPARWPG

SEQ ID NO: 1169 - protein, 106 aa, Pinus radiata
QDTHSEPMAMEMGLVIDGDRFSSEGDGDIMLDGEDLLPEINDMFWEQFLAESATSGGTEEAESAAQESLTKDQDEKPSENGNWWKKNQNMDNLTEQMGQLASESNP

SEQ ID NO: 1170 - protein, 144 aa, Pinus radiata
DGAVRDAGRLVPAPFLVKMYRLVDDPSTNHIVSWGENNNSFVVWRPKEFSASVLPCYFNHANFSSFVRQLNNYGFRKTFRGQCEFSNKLFEKGKQYLLCHIHRRRASNSSPMPMEYGKSSLLFPIILPTQHSNVLAAPLPSSLS

SEQ ID NO: 1171 - protein, 62 aa, Pinus radiata
KERILTEENLFLRKKCGDEHVDCSAFRTPPAQLRSIQNIDVETQLVIRPPTVQQHPDVDSPR

SEQ ID NO: 1172 - protein, 88 aa, Pinus radiata
DPNAPKKAMTGFMFFSQVERENLKKSDPGMAFTDVGRTLGERWKKMSAEEKAPYESKARADKERYKEAMADYKSGPTNVDSGNESDSE

SEQ ID NO: 1173 - protein, 106 aa, Pinus radiata
LLFGVNIDSSSLIVPNTVSNMRSIGSSTDAVMQFGVSNYLNAPPCASGSNISLNSDISASACLDESGLLPPAENLGQMNAPTRTFIKVYKQGSVGRSLDISRFSSY

SEQ ID NO: 1174 - protein, 108 aa, Pinus radiata
MATTRHQRSPDSSPRSEDESGAHTYSNQDGSVKEQDRFLPIANVSRIMKKALPANAKISKDAKETVQECVSEFISFITGEASDKCQREKKKTINGDDLLWAMGTLGFE

SEQ ID NO: 1175 - protein, 137 aa, Pinus radiata
KSDYRDSDDEGGGTVREGKDLQTSNFIDYFGQSNHTEEAENEHDASVDTKGPLESSNEVGHPTTYPESSSLSAQGSEPRVFSCNYCQRKFYSSQALGGHQNAHKRERTLAKRGQRIGAFQHRYISMASLPLHGSTES

SEQ ID NO: 1176 - protein, 206 aa, Pinus radiata
SRGKALKLFGFEFRGSEGGSFEGTNGSDQPQDGTNILTAGEASTEPVEEELVIEAKNGDSGKLEDVGSPVEAGESGSTSNCLGSSAQENRKYECQYCCREFANSQALGGHQNAHKKERQQAKRAHLLATRSAAASANRSGATAWCGNINGNLYHRNFLFNNSYFTRMQVFQEDFPTFQTPQAVAAPSIPHYIFSYQQQQQAPVQSR

SEQ ID NO: 1177 - protein, 116 aa, Pinus radiata
VPENSKQIINHGLILPEMGSVDSGREGTRAILSDDCVKFECRYCCRVFPTSQALGGHQNAHKRERRRAMTRFQRSPSDSSNYSGKQNSIDLFSRERVPGSSLLSPHGTRDHVVCSD

SEQ ID NO: 1178 - protein, 122 aa, Pinus radiata
KKASEWGESVVSTSENSNDLDPPTYSETSSPAQGSDPRVFPCNFCQSKFYSSQALGGHQNAHKRERTLARRAQRMGSFAQRYSSMASLPLHGSSETSWTPSRFLGIKAHSLIHKPFPEGDNL

SEQ ID NO: 1179 - protein, 113 aa, Pinus radiata; identical to SEQ ID NO: 1074

SEQ ID NO: 1180 - protein, 76 aa, Pinus radiata
MRRPQRKKKTDAEDDFDECYYTHMCKICKKKFVSGRAFGGHMRIHGPVATAAAAAAESNGKNLEPQRKRSRAEEIR

SEQ ID NO: 1181 - protein, 130 aa, Pinus radiata
VGCKGSDAFEESLKHFCRVCKRRFACGRALGGHMRVHGAELGAIKGGGLEEQFEKGRVKEPSRSCGDSVKEGVQDEVEGLNSMYTLRRNPKRSWRFADQDYSFAFGGVDGSGAKRFGSTFLRDSRVCEEC

SEQ ID NO: 1182 - protein, 86 aa, Pinus radiata; identical to SEQ ID NO: 940

SEQ ID NO: 1183 - DNA, 462 bp, Eucalyptus grandis
  misc_feature (306)..(306): n is a, c, g, or t
  misc_feature (313)..(313): n is a, c, g, or t
acaaacaaacaaacaagacggaacgagatgaagacggttcagtcgaagaagttcaggggcgtcagacagcgtcactggggctcttgggtttccgaaattcgccatcctctgttgaagagaagggtgtggctgggcacgttcgagacggctgaggaggcggcacgagcctacgaccaggccgccatcttgatgagtggccgcaatgcaaagaccaacttcccgacatctcaaaccacgaacggcgaccccgccgctgccaattccttgtcttcctcgaagcacttgtcggagatcctccacgcgaantcaaganatgcagcaagacgccgtcgccatccctcacctgcctaaggctcgacactgagaactcccacatcggagtctggcagaagggtgccggccagcgtcagactcaactgggtatgaccgtacagtcggaacaaaaatccgatccattggtag

SEQ ID NO: 1184 - DNA, 340 bp, Eucalyptus grandis; identical to SEQ ID NO: 226

SEQ ID NO: 1185 - DNA, 190 bp, Eucalyptus grandis
cttggggttgacatggcgcgacgtggcggaggaaggaggcgaacggcggctccgaggcgtccgacgccgtcttgccgcgagctcatcatcgccatcgttacaagggagtgaggatgcggaagtgggggaagtgggtggcggagatacggcagcccaacagccgggaccgcatctggctcggctcctacgc

SEQ ID NO: 1186 - DNA, 473 bp, Eucalyptus grandis
  misc_feature (10)..(10): n is a, c, g, or t
  misc_feature (156)..(156): n is a, c, g, or t
aacaaaggtntgtgtatggaaccattctggatagcattgcaaaggttactggaattgtgaagtttgatctgcatgctgagccagaggaaggaaaaaagaagattgaggtcggaggaaatgttgcaggtgtgtttgacctaggaccaggtagaattnggttctgaagctgtttttgtccctcgagagcctggcatcacttctgaagaagatgatgggtacctgatattctttgtccatgatgaaagcacagggaagtcggcagtaaatgtaattgatgcgaaaaacatgtcatctgatcctgttgctgtcgttgaattaccccatagggttccttatggcttccatgccttcttcgtgactgaggaacaacttcaggaactggctaagctgtaggtctctacatgcacgaattgttgggaatgcagatgttgcgaggggaggcatatctctggaaagctgctacagttgatcta

SEQ ID NO: 1187 - DNA, 333 bp, Eucalyptus grandis
accagatccagatgcagaggtcattgcactatcgccaaagacgctcatggcgacgaacaggttcgtttgcgagatatgcaacaaaggcttccagagggaccagaacctgcagctgcaccggaggggccacaacctgccatggaagctccggcagaggagcaaggagatcgtcaagaagaaggtttatatatgccctgagaagacgtgcgtgcaccacgacccttcaagggcacttggcgacctcactgggatcaagaagcacttcagccggaagcatggcgagaagaagtggaagtgtgagaagtgctcgaagaagtacgcagtccagtcaga

SEQ ID NO: 1188 - DNA, 420 bp, Eucalyptus grandis; identical to SEQ ID NO: 234

SEQ ID NO: 1189 - DNA, 365 bp, Eucalyptus grandis
  misc_feature (245)..(245): n is a, c, g, or t
  misc_feature (281)..(281): n is a, c, g, or t
tgacgccgagcgacgtggggaagctgaaccggctggtgatcccgaagcagcacgcggagaagcacttcccgctgccgggcgggccggcggcgacgatgaagggcgtactgctcaacttcgaggacgtcggcgggaaggtgtggcggttccggtattcgtactggaacagcagccagagctacgtgctcaccaagggttggagccggttcgtgaaggagaagagcctgaaggccggcgacaccgtntgcttccagcggtcgaccgggccggacaagcagctntacatcgacttcaagccgcggggccagccgccggccggcccggccgcgccgccgccgccgcccgtacagatggtgaggctgttc

SEQ ID NO: 1190 - DNA, 434 bp, Eucalyptus grandis; identical to SEQ ID NO: 324

SEQ ID NO: 1191 - DNA, 479 bp, Eucalyptus grandis
gaatcgtttcttggactttcttgagctgctcctttcgcctcatttctcaagtgcgtgaaaaccaaaaaaatggtgagggggaagactcagatgaggaggatagagaacaagacgagcaggcaagtgaccttctcgaagcgtcggaacgggctgctcaagaaggccttcgagctctcggttctttgcgatgctgaagtcgccgccatcattttctctcctactggaaaactttatgagttctctacctcaagcatgagcagcataatagaacgatatcaaaggaaaacaaaggacccggggtgcagcgagaaaactaccgaaatcgatttgcagaatatgaagggaaactctctagacatggcaaagatgatcgaacttctcaacgtttccaacagtcggctctcaggagaactttcagatacgtgttcagttgaggagctacaatcaacacagaacctgttagagagaagcttatccaa

SEQ ID NO: 1192 - DNA, 310 bp, Eucalyptus grandis
ccctcttcctcttcctctccctctctctgtcgcagagctccgtctgaactcgcagaatccacgcgcagagcgacccaagagtgtttcagaacagtccgtccatggccttggaagctatcaactctcccaccgcggcctcagcgccgttccagttcatggaggagcccttgagctcccgcttcttggagcccctgaacaagcgcaagcgctccaagcgcccccaccaccctccctccgaagatgagtacctcgccctctgcctcatcatgctcgcccgcagcggcgccgcccccaagcccaaccaccacgc

SEQ ID NO: 1193 - DNA, 466 bp, Eucalyptus grandis
tttttttttttttttattcaaaaacaaaatctcacttgccctttcttaatatatagtagccaaagccttctggagatcaccttttatcagctaccaccagtcagataggtctattgaatatgcttgattgctcgttcctcaagcatatgcaactacaaagactcccatatcaaagcactagctgcatatacacttttaagctaactaacaagagaatttaaaaagaaaatcctcgctgcaccaaaaaggctcgatccatatgggcaccaaaacaaatagctcacattggcataagctttggaccattatcaggcatgcccatccctgcagctaactcagcatcaagctgagtatgtggcgcaggacccatcatttgcttcatacgtttcttgtggcgcttcgtcttgaaatgctcgtccctcgtagcaacattcggaaaatatcggtcgcagtgcaggcaatagta

SEQ ID NO: 1194 - DNA, 295 bp, Eucalyptus grandis
gccacccaacacacacccaagaaaattcttagagcctccttagatatgcctacagacctggacaattcgtccacagcttcaggggaagctagtgtctcgtcttctggcaatcagccgcctccacaaccaccgccaccgccttccaccaccaagaaaaagaggaatctccctggaatgcccgatccagatgcagaggtgatagctctgtctcccacgaccctattggccaccaacaggttcgtctgcgaaatctgcaacaagggatttcagagggaccagaacttgcagctccaca

SEQ ID NO: 1195 - DNA, 337 bp, Eucalyptus grandis
tccaccctcactcgcgaagtcaaaatcttctagtgtagccatattcttgatgaacattcacacgcaactaccgtcggacgtgcgggtgccgacgccggcgcagtcgtcttcgccgtccccgtcgcagtcgtcgcagtcggagtcctccgcgagccacgccgcgtgctccgacgaggagccggccgtggcgctggcttccagccggcccaagaggccggctgggcggaaggtcttcaaggagacgaggcacccggtgtaccgtggggtgcggcggcggaacaggggcaagtgggtgtgcgagctccgggagcccaacaagaagacccgggtatggctc

SEQ ID NO: 1196 - DNA, 450 bp, Eucalyptus grandis
  misc_feature (52)..(52): n is a, c, g, or t
  misc_feature (155)..(155): n is a, c, g, or t
  misc_feature (435)..(435): n is a, c, g, or t
gaatgatgcatgtgatggaccggtaacaggacttgcactgtcaaagtgccgnacgctcatcggtctgccagaaactcacggagagagagagatggcggagagagaggagaaggggaagtacgacgagatgatgatgaagaaggggagcgacgganggatagcggaggtgaatcccacgccgaagaagggggtgacgtccaaggttgtggactacattgagaagctgatcgtgaagttcatgtacgactcctctctgcctcaccaatacctcgccggcaacttcgctcccgtcgccgacgagacccctcccgtcaccgacctccccgtcgtcggccatctccctgattgcttgaatggagaattcgtccgggtgggccccaatcccaagtttgccccggtcgccggataccactggtttgatggagatggcatggntcatgggatgcggat

SEQ ID NO: 1197 - DNA, 351 bp, Eucalyptus grandis
ctccagccagcttctgtctcttataaacactagccccaccccattcattatccacttcactccaacccaacagctatcgcactatcccactgcagacgccctcccacgaaccctttctcttctgatccccatcccaactcctgccgcttcgacttccccaagccgtccttctcgtcgccgctgtccaacgggagtagcgccatggcagcccccgggaacttctccgacgaggaggtgcgcctcgcgtcccaccacccaaagaagcgcgccgggaggaagaagttccgggagacgcgccaccccgtgtaccggggagtgcggctgcgtgactcgggcaagtgggtctgcgag

SEQ ID NO: 1198 - DNA, 359 bp, Eucalyptus grandis
agaacacctcagaatcaacaccactccccaatttctctctctaagatcccacacccaaccgccaccctcaatctctctctttctctctcttcttcagtgtctgccatggctttggaggccctcagctcccccaccgctccctccgccccgttccaattcatgaaggactcctcccccgccgccgccgccgccgcctcctcctcctcctccgcctacgacctccccctcgccgagccctgggccaagcgcaagcgctccaagcgcccccacaacccgccctccgaggacgagtacctcgccctctgcctcatcatgctcgcccgcggcggcgccggccggaccctccccccgccgcctcc

SEQ ID NO: 1199 - DNA, 645 bp, Eucalyptus grandis
  misc_feature (242)..(242): n is a, c, g, or t
tcgactgagagatcctagtggaaatagaagatttcctgataccatcgatccattcttctccaatggctgcgaatttcgtcattccaaccaaaatgaaggcttgggtgtaccgtgagcacggagacgtcgccaacgtattgggattggacccggaactcaaggtccctgaattgcaagaaggccaagtgctggttaaagttcttgccgcggcgctcaatccaatcgacaccgcgagagtgaangggggttatcaagctcccggcttttctctaccggccgtgccaggttacgatctcgccggcgttgtggtgaaggtgggccgcgaagtaaaggagctcaaggtcggggacgaggtatatggatttatgtttcacgccaagaaagacgggacgctggctgagtacgcagccgtggaagagtcattcttggctttgaagcccaagaagctgcgtttcggggaggctgcttctctgccgtggtcattcagaccgctatggaggccttgaaagaactggcctctctcatggcaagtcccttcttcgtcttaagtggtgctggtggcgtcggcacactcataatacagctagcttaaggaagttttggtgcatcaagagttccagttcattcaacactgggaaacctaga

SEQ ID NO: 1200 - DNA, 376 bp, Eucalyptus grandis
  misc_feature (102)..(102): n is a, c, g, or t
  misc_feature (366)..(366): n is a, c, g, or t
tttttttttttttttgtgtactggtgcactatgaattgtgagcattcaatcaaactatatatagacaacattcttccttatataggcgggagcaactacggngttgacagcaaaatttacaaagccagcagctagcacaggatgtcaagattcacctccaaaccgataaagtcgacatggctctattaatccagccaagatatagagccccctccctctgctcgattctgtaattcccgtgatactgcttcagcatatcgagcacagcacgagtaaccgatgcgtccactggtagctgattgaaaccggccatttggaatctggaccgccatttgccgaaaagctcatgcctttccatcctctcangcccatcaca

SEQ ID NO: 1201 - DNA, 461 bp, Eucalyptus grandis
cgacaccgaccagggtgttcatgtattgtttgtatacaaccccccagtggaaagggcccaaaacacaagccaacatgcacatgtaatgtctgtctgaccgtaaagcgccgtttccgcaccttgatgctgaggcgcgaaaagaaacagttggagaaagaaggggaaggttcgcgcaagaagctgcaacatcagaacctatcacttgcagaaaaatcaccggaagacgacccttcaaagtgcaataacaacaatgcaaatggcagcccaagccagaaaaaggtgggcaatgatggttccgacgacgaaatgaacagggttaaaagctcgggttcaccttttaaaggtcagatcgatcttaatattcagccagagcgcgaggaggagctctcgcctgggtcagattctggtggtatgatgaagttgctacatgatgccacccagaatatctcaggcagagggct

SEQ ID NO: 1202 - DNA, 447 bp, Eucalyptus grandis
ggaagtacgacgagatgatgatgaagaaggggagcgacggagggatagcggaggtgaatcccacgccgaagaagggggtgacgtccaaggttgtggactacattgagaagctgatcgtgaagttcatgtacgactcctctctgcctcaccaatacctcgccggcaacttcgctcccgtcgccgacgagacccctcccgtcaccgacctccccgtcgtcggccatctccctgattgcttgaatggagaattcgtccgggtgggccccaatcccaagtttgccccggtcgccggataccactggtttgatggagatggcatggttcatgggatgcggataaaaaatggcaaagctacttacgtctctcgctatgtgaggacgtcgaaacttaagcaagaggagtactatgggggagctaaatttatgaagattggagaccttaaagggc

SEQ ID NO: 1203 - DNA, 454 bp, Eucalyptus grandis; identical to SEQ ID NO: 301

SEQ ID NO: 1204 - DNA, 352 bp, Eucalyptus grandis
gttttttacgcatgtagaaaaagtcattgagtttgcctgtgctgcatacattcattgctttagctgactggggcctgagagagtttgtgtatgttactggcagacgccgaaggcggaaaggagaagaaggaagttaaagaaaggttcgccttcaagacgaaatccgaggttgagatactagatgacggattcaagtggaggaagtacgggaagaagatggtgaagaacagtccgaatccgaggaactactatcggtgttcggtggaaggctgtcctgtgaagaagagagtcgaacgggacagagacgacccaaggtatgtaataacaacatacgagggcatccataatcacc

SEQ ID NO: 1205 - DNA, 400 bp, Eucalyptus grandis
ccgaaatggccgaacttgatgaatcttccactttggaactcatcacgcagtatctcttagaagactctatcaacctcgctcaactccaaccggtgaaaacagagaacctgtttctcgatccaggaccagactcgccagattcagatcatcccacctggcaagacctggagacaccaaatcttgagattaaagccgagcccatcaccttggaatctccagagtcggagttggggtcgccggagaagaatcaggacgaggctggctccgcggccaaggcaagttacagaggggttcggcgaagaccatggggaaaatatgctgcggagatacgggacccgacacgtaaagggagccgggtctggttagggacctacgacacggacgtagatgctgccaaggc

SEQ ID NO: 1206 - DNA, 408 bp, Eucalyptus grandis
  misc_feature (57)..(57): n is a, c, g, or t
tttttctcccttggtgcgtgatgtgtggaggcgccatcatttccgacttcgtcgagngcggctcgaccgccgccgccccgggagctgccgccccgagaggaagctgacccctcacgagctctggtccgagctcgaccccgcctccgacctcctcagcctcgacggccccgtggcccaaggccaccccaaccctttctctctcgtcgcaaaccaactcaaccaagtgatgaagagtgaagagaagaacagtgaggaggcgggtcacggacacgtgtcggagacccagaagagccagagcaatggccggagccagagggctcgcaagaacgtgtacagagggatccggcagaggccgtggggcaagtgggccgccgagatcagggacccccacaagggcgtccgcgtctg

SEQ ID NO: 1207 - DNA, 270 bp, Eucalyptus grandis
accgtgggatccggcagcgcccgtggggcaagtgggcggcggagatccgcgacccgaggaagggcgtccgggtctggctcgggacgttcaacaccgccgaggaggccgcgcgggcttacgaccgggaggcccgtaagatccgcggcaagaaggccaaggtgaatttccccaacgaggacgacgccttctccaccatcccgcgggctcaccagacccagcaccaccacccccaggtccccgaactaccctcctctgtatcaacccaactgg

SEQ ID NO: 1208 - DNA, 339 bp, Eucalyptus grandis
ctttctgctggacggaaaccactttggggcagctcgatccccgtgatgcgcaactttggggggccaccaggtctccttgcgaggcaatgaatgagggcgggccattgaaaaccataaaggataccaaaatcgataatatgcagtttcgtcgctttctcagatatgcttaaaatcatatggttagaatagatgatcgcaaacctctgaaatgggaaaactgagagataagctcggtaagctttcaacatttcagtagcagatttccttttggagcctaactccgtatagacttgcgctcctgtgcaatccatgcgtgccttaagggcttcggcaaaagag

SEQ ID NO: 1209 - DNA, 405 bp, Eucalyptus grandis
aaaccctgcaattcaggaaaagaaacccctttttgatctctctccatctgctccgatggtcggttcggaggggatgaattcttgaaaaacaaggaggaacgatcgtctcctttcttgggggggctggggattggggggaggaatgggggcgcagcacaactcaggacgaacccggaatgggagacccatgtgatcctgaacgtgtacgatctcacccccgcgaacagctacaccgcctggtgcggcctgggcatcttccattccggcattcaaggttctctgtgtagttgcattcttccagaaagccttcaagtaactactgttaagccagagtatcatgacttctccgaggaagatggtgctgaatctgtgtcgactgtgactaccgagatagatgacgccgag

SEQ ID NO: 1210 - DNA, 521 bp, Eucalyptus grandis; identical to SEQ ID NO: 238

SEQ ID NO: 1211 - DNA, 537 bp, Eucalyptus grandis
ttcgaaaatcccatttcctctcgacctgtgtagcttgcaactcttggagtcttgatagagaaggagagagaaggagaaagagtgggtgatgggtttcgggggaagttggagcgtgcccgcgaaggcgtgcgactcgtgcaagaccgcggcggcggccgtgttctgccgcgccgacgcggcgttcctgtgcctcggctgcgacgcccgggtccacggggccgccaagctgtccgcgcgccacgagcgggtgtgggtgtgcgaggtctgcgagcaggcccccgccgccgtcacctgcaaggcggacgccgcggcgctctgcgtcacctgcgacgccgacatccactccgccaaccccctcgcccgccgccacgagcgggtgcccgtggagcccttcctcgacgccgccgagtccatctccagggccgcctccgccttcaacttcctcgccgtgcctaccaagaccggcagcgccgacacgtgcggcggcggcggtggcggcttcggcggctcgtgccagaatgaggagctggaggaagc

SEQ ID NO: 1212 - DNA, 399 bp, Eucalyptus grandis
ccgaaacgcctttttcctcacatttcccatctccttttccaagaagcgaagcccgaaaagtccaatccccgttcttccaaaccctgcaattcaggaaaagaaacccctttttgatctctctccatctgctccgatggtcggttcggaggggatgaattcttgaaaaacaaggaggaacgatcgtctcctttcttgggggggctggggattggggggaggaatgggggcgcagcacaactccaggacgaacccggaatgggagacccatgtgatcctgaacgtgtacgatctcacccccgcgaacagctacaccgcctggtgcggcctgggcatcttccattccggcattcaagtgcatggtaaaggaatatggctttggagcgcacgacttttccagct

SEQ ID NO: 1213 - DNA, 283 bp, Eucalyptus grandis; identical to SEQ ID NO: 270

SEQ ID NO: 1214 - DNA, 324 bp, Eucalyptus grandis
ttttcaagaagcacgcccacgtaacgggggaaatgctgagggagaacccatctgacggttctttttgttgagggaagggaaagagagaggaggcagagggaggaaggaatccgcagcagcagtcgtcggaggaggaggacattttccaggtgaaccccaagtagaattgcgatattggtttattcgtaatgggctgcgtcgcttcaagaattgatgaagaagagagggttcgggcgtgcaaggagagaaagaggctgatgaagcagttgctggtgtttagggaagaatttgctgatgccctgttggcttacttaagagccctga

SEQ ID NO: 1215 - DNA, 358 bp, Eucalyptus grandis
tttaatggccttgacgcaggggaggggagattttctgaacttggggagatggtagaatagctgccgaggtgtcaactcatgtcagaattctgactgatctggggatcttgctctcaaagaggatttctaagagcagtatctcaacttggcatacgttcagcaactggaaaatagtaggttcaggcttatgcaactggaacaggagcttcaacgagcacgccagcagggtatatttgttagttctggaaatcctggggatctcagtcataacatggctgccattggcaatggggccatggcctttgacaccgactatgcccggtggctcgatgagcatcaacggctgatcaatgaccta

SEQ ID NO: 1216 - DNA, 329 bp, Eucalyptus grandis
ccgctgtggcaagagctgccgcctccggtggatcaattacctgcggccggacctcaagcggggcaacttcaccgaagaagaggatgagatcatcatcaaactgcacagccttcttggtaacaaatggtcgctcattgctgggcgtttgccggggagaacggacaacgagatcaagaactactggaacacgcacataaggaggaagcttttgaaccgaggcatcgatccggccactcacaggctgatcaatgagcccgcacaagatcaccatgacgagcccaccatttcttttgctgctaattctaaggagatcaaagagatgaagaaca

SEQ ID NO: 1217 - DNA, 346 bp, Eucalyptus grandis
aagaacgtcgccccatcaactccacccggcgttttcaagaactcgcagagatcaagaactcgagccggcttctgcagcgtgcaccgttatgccgtcggagtgcgccgaccgcaagcccgcgaaggccccccacggcggccacctccacgcggccggggcgggggccgccgcgccgcagccgcaggagcaggagcacctcccctgcccgcgctgcgactccaccaacaccaagttctgctactacaacaactacaacttctcccagccccgccacttctgcaagtcctgccgccgctactggacccacggcggcaccctcagggacatccccgtcggcggcggcagc

SEQ ID NO: 1218 - DNA, 468 bp, Eucalyptus grandis
aaactgggatagatggcgggcagacgatgaaaacgttgatagggagcttaatgataatctaaatgcaccttcataccctcctcaccaacctacgcaatcttatccaagaggaggctatagagtatgtagtggctgcaaccgtcaaataggctatggcaactatttgggatgtatgggaactttcttccatccggaatgctttctctgtcgtgcttgcaggtaccccattcaagaatatgagttttccttagcaggaaaggatccttatcaccagtcttgcttcaaggagttgacacatccaaaatgtgaagtttgccatcaatttatcccaacaaatggagttggtttgattgagtatagatgccatcctttctggtcccagaaagtactgtccgtcgcatgagcttgacaaacacagctccgatggttgtagttgccaacggtttggaggcatgggaacaccaccat

SEQ ID NO: 1219 - DNA, 162 bp, Eucalyptus grandis
tgaggtagatattcttgacgatggttatcgctggcgcaagtatgggcagaaagttgtgaagggaaacccgaacccaaggagttactacaagtgcacaagtcctggctgcacggttaggaagcacgtagagagggcgtcacatgaccttaagtcagtaattac

SEQ ID NO: 1220 - DNA, 354 bp, Eucalyptus grandis
gcctggcatcacttctgaaagaagatgatgggtacctgaatattctttgtccatgatgaaagcacagggaagtcggcagtaaatgtaattgatgcgaaaaacatgtcatctgatcctgttgctgttgttgaattaccccatagggttccttatggcttccatgccttcttcgtgactgaggaacaacttcaggaactggctaagctgtaggtctctacatgcacgaattgttgggaatgcagatgttgcgaggggaggcatatctctggaaagctgctacagttgatctaatagtttgatatttacatggacagacatctttatgctaaatatagtggaaatataaagtatggt

SEQ ID NO: 1221 - DNA, 310 bp, Eucalyptus grandis
gcggaggaggggctgagtcggaaattggggaactcggttgcttgcgaaggtagggaccgggtcgaaagatgcgaggtgttcgggaagtggagggcccgcatggggatggctgggttcgagctgaagccactgggtcaacacgtggccgaatcaatgaaggcgaggctcgaaagtgggaaccgggtcaacccgggattcacggtgaaagaagagaatggtgggatttgcttcggctggctcggccgaacactcaccgtcgcatccgcctggcgttaagctccactcgctccccctctctcccccctgtgca

SEQ ID NO: 1222 - DNA, 315 bp, Eucalyptus grandis
  misc_feature (19)..(19): n is a, c, g, or t
  misc_feature (99)..(99): n is a, c, g, or t
atttcagatcccatcatgnatgcatgactttgccattacagagaattatgcaattttcatggatcttcctctttatttcaggcccaaggaaatggttanagataacaagctaatatttacatttgataaaaccaaaaaatctcgctttggggtacttccacgatatgcaaagaacgagcttcaaatcagatggtttgagcttccaaactgcttcatttttcacaatgccaatgcatgggaggaggaagatgaagttgttttggttacatgccgtcttgagaatcttgatctggacatggtcagtgggactgtcaa

SEQ ID NO: 1223 - DNA, 393 bp, Eucalyptus grandis
gcttaatcctcaaagaaagtgaagctacccttcgtgaagctcttcggaacatgatgcagaatggcaaatcgaaagtgccaaatgaggggaaggcccacggcaagaagcaaggcaggcgcaagagggatgtggtcgacttgagaactcttttgacactttgtgcacaagctgttactatggatgatcgaggaagcgcaggtgagctgctcaagcagatcagaaggcatgcgtctcccacaggggacgggatgcaaaggatggcacactattttgcgaatggtctgcaggcacgccttgccgggtcaggctctcaaatttttaaggctctcatggctaggccaagatcggctgttgatgtcttgaagggttatcatctcctcctcacaattttgt

SEQ ID NO: 1224 - DNA, 337 bp, Eucalyptus grandis
  misc_feature (54)..(54): n is a, c, g, or t
gagaaatcctcatcatccgtcaaggcaatctcggatcctcaagccagccactgnagaagtgttcgtagcatctcttctcaaagatctagccgagatccccggccttcttcaagcagcttacgatctttacaagtgggaccttcagaagagagactgccatcagtcgcagatggttactcaagacattcgaggccactttctgccataggatggcgtaataatgatggggctcggagatcaagggtatctactgaaagatttcggtcgtttcctgatgaaggaagtggccgtgatcaattagaatatgagggattcatgattgcggatcgcccaggtt

SEQ ID NO: 1225 - DNA, 226 bp, Eucalyptus grandis
  misc_feature (134)..(134): n is a, c, g, or t
tgttggcaccatgtacacacacagtgtggtaaagcaggctttgggatgctcaagcaagagaatctgagcaatgaactagatagggtcaaaaaggagaacgacaacttgcagattcagctcaggcacctgagagngaagacataacatcactgaaccacagagagctgataatcctagaagacactcttgaaaacggcctcggatgtgtccgagaccagaaggacga

SEQ ID NO: 1226 - DNA, 415 bp, Eucalyptus grandis
cggaccgccaggactgcacggtggcgtgccggatgttcgggccggggtgcttcgggggcgagcccttcttcgtggcgagggatccggacgattcggaggcggaggaggacgacggctacgtggtgagttacgtgcacgacgagcgcaaaggggagtcgaggttcctggtgatggatgccaagtcgccggagctggacatcgtggcctccgtccggctacccaggcgggtgccgtacgggttccacgggctattcgtgagggatagccacctcaaaatgtcttagcgttcatgggcgatgatgcgacgtggaggtacagagattggggtcttttattacaggattttacgtagtctagagcatgatacaaagctatatcccaccaacatgccgcagttaaattaggtggggtagtt

SEQ ID NO: 1227 - DNA, 389 bp, Eucalyptus grandis
  misc_feature (199)..(199): n is a, c, g, or t
  misc_feature (222)..(222): n is a, c, g, or t
acattcatggggatatgcagcctccaacattcatctcagcaggcggaggaggcgctgtcccaggggctagaacagctccaacagtcactcgtcgacaccattgccggcgggcccagcatcgaaggaatgcaacagatggcaatcgccttgggcaaattaaccaatctcgaaggctttgttcgacaagctgataacttgnggcaacatacccttcatcactgncgccggatactgagagttcgacaagccgcacgcgattttttggtgatcggagagtattatggtcgactacgagcattgagtactctatgggcgtctcgtcctcgagggtgcatgatggatgatgataactcacgccaaacaacaacggacctgcaaattgttcaggt

SEQ ID NO: 1228 - DNA, 435 bp, Eucalyptus grandis
cttcaccggcactaggaatcagggcttcttggagggatttgggttctccacctcgtcgtccacgttgtcggaaactgcgaaccggggggagaactccgggagtgccggggtgttcagattgaactcgcggtgcccctgactttgcgtgagttgacgccacgccctccgagacgctcaccctgttggcagtcaaggcgacggcgacgcgacggcggctgaggagacaggagttggggcctcatagtggtacctcgtgcccaccgagagcttggccggtaggggagctcttgtggcagatcgagcactcgtggaccttcccggacataccggaggaggtggtcgtcgcggaggtcgaggtggccggctgttcgtccgcaccggcgaagagaaagtgtgttggtatagaggcgagaggagagagaagagagagaagaa

SEQ ID NO: 1229 - DNA, 252 bp, Eucalyptus grandis
gcaatccagacccagatgcggaagtgatagccttgtcgccgaagacgctcatggcgaccaaccgattcatatgcgagatctgcaacaaagggtttcaaagggaccagaacctccagctccacaggagagggcacaacctgccttggaagctgaagcaaagaccaaaggatgaaccgataaggaagaaggtgtacgtttgccccgagccgacatgcgtgcaccatgacgcgttgagagcgctcggtgatctca

SEQ ID NO: 1230 - DNA, 326 bp, Eucalyptus grandis
  misc_feature (105)..(105): n is a, c, g, or t
  misc_feature (163)..(163): n is a, c, g, or t
  misc_feature (267)..(267): n is a, c, g, or t
catccatgcccgagaccggaaacgccgcaacggccgcagctccgatccccatgccggggaatttcccataccgcgcccaggagatccagtagggggggcgtccgnaagcggccctggagggggtatgcggccgagatccgagacccggagaagaagacccgantctggctcggcaccttcgacaccgccgaggaagcagcccgcgcctacgacgcggccgcccgagaattccgcggctccaatgccaagactaacttccccctcggnttccgcgccccccaggtcatggccaagaccaactcggtagatgcatcagcgagtagcgg

SEQ ID NO: 1231 - DNA, 424 bp, Eucalyptus grandis
cttcctacctcgtcagcccttcggctgttggatcaggttccgaaactgtgttcctagacttgagccttggttgcagcaatgatgagtccagcgggagggattctgtaggagtcgccttctcgagcaccagcgaatgtagcaatgagcccgaatctcatccggcagctgcaggaccaaccacttcaagagtcttttcttgcaattactgtcaaaggaagtttttcagctcacaggcactcggtggccatcagaacgcgcacaagagagagaggaccctggcaaagcgggcaatgaggatgggcatgttttcttcacagagatattccagcttggcgtctttgcctttgcacgggtctcccactgtcagggatctggggatcaaagcgcattcttccgtgcaccaggtgcaccaaggcatgttgca

SEQ ID NO: 1232 - DNA, 321 bp, Eucalyptus grandis
atgatgatgaagaaggggagcgacggagggatagcggaggtgaatcccacgccgaagaagggggtgacgtccaaggttgtggactacattgagaagctgatcgtgaagttcatgtacgactcctctctgcctcaccaatacctcgccggcaacttcgctcccgtcgccgacgagacccctcccgtcaccgacctccccgtcgtcggccatctccctgattgcttgaatggagaattcgtccgggtgggccccaatcccaagtttgccccggtcgccggataccactggtttgatggagatggcatggttcatgggatgcgg

SEQ ID NO: 1233 - DNA, 508 bp, Eucalyptus grandis
  misc_feature (12)..(12): n is a, c, g, or t
gacgagatgatnatgaagaaggggagcgacggagggatagcggaggtgaatcccacgccgaagaagggggtgacgtccaaggttgtggactacattgagaagctgatcgtgaagttcatgtacgactcctctctgcctcaccaatacctcgccggcaacttcgctcccgtcgccgacgagacccctcccgtcaccgacctccccgtcgtcggccatctccctgattgcttgaatggagaattcgtccgggtgggccccaatcccaagtttgccccggtcgccggataccactggtttgatggagatggcatggttcatgggatgcggataaaaaatggcaaagctacttacgtctctcgctatgtgaggacgtcgaaacttaagcaagaggagtactatgggggagctaaatttatgaagattggagaccttaaagggctttttggtttactcatggtcaatatgcaaatgctgagagcaaaactgaaaatactagatgtttcatatg

SEQ ID NO: 1234 - DNA, 503 bp, Eucalyptus grandis; identical to SEQ ID NO: 305

SEQ ID NO: 1235 - DNA, 367 bp, Eucalyptus grandis
aaaaagtatatatacctcggcctatttgatagtgaagtagaggcagcaagggcgtatgacaaggcagctatcaaatgtaatggaagagaggctgtgaccaactttgaacctagtacgtacgatggagagatgattgcaaaagccagcaatgaaaatagcatctatggtgaccatggtcttgatctcaatctcgggatatcagcttcttccaggggaatggtggaaaccttagagccctcggacgacatgcgtcagggaagtagtttaagggtaggaaactctgctgcatcctggggtgatccatctgttgaaggtttatcgatgacatctggacaacctcctccttgacgggtgtttatcctagcgt

SEQ ID NO: 1236 - DNA, 360 bp, Eucalyptus grandis
ctccgccgtggcggtcgccgcgacaacagcaacaacctcctcctcctccacctcctcgaccgggtcggatccggcgctagaaccgagcaaaagaagcgaggattgcacttctcaaaagggcccggggaagtccccgagcccgggcgcccacccggaggagccggccggcaagaggcacaaggccgggggctccggcgagcacccgacgtaccgtggggtccgaatgcggaactggggcaagtgggtgtccgagatccgggagccgaggaagaagtcgagaatctggctcgggacgtaccccacggcggagatggccgcccgggcccacgacgtggcggcattggccataaagggcagctc

SEQ ID NO: 1237 - DNA, 539 bp, Eucalyptus grandis
  misc_feature (146)..(146): n is a, c, g, or t
  misc_feature (151)..(151): n is a, c, g, or t
  misc_feature (153)..(153): n is a, c, g, or t
tctctctttctctctcctctgtgattgcagatcaggctcccacgccgttccattcgcgcatctccgacctcctctctccacgcggccactgtcccgtcgcgcgaattcaccccgccgtcgtaggagaccgcatcctacgccgccgnggcgnanggcggcgccacgaggagatgccaggggaaggaatcaattacttcctcgttactggcccaggataacagatcaagagctacaacaaatctctggagagtatccttttgttctatgtgctttgattgatttatagcaactcctagaaaggtgaattatcgcgcgtcaatagaacagggttaggatttcaatagataggatgaaaagccgggaaggttcagtttcacctctgctactaattagcattcatgatcctattccttaacttttataagctcaaactctgtaatcactcctctgtttgagaaaatgttgagtgctagtgatgcaggtaaaattggacgtttagtgctgccaagaaaatgtgccgaggcctattttccggctat

SEQ ID NO: 1238 - DNA, 520 bp, Eucalyptus grandis
tctggctgtcctgatagctttgatgaaggcagatctggaatttttgaattcaaacctctagctacatcaaacttggtccccacagaggcaaagcaccaaggaagtgaacaggctgtgaaagtttcaggtcaacgtcattctcaaccatttgcatcactgtcttcagttcagagtgatttggctgtctcatcgaaggaattgtgtctatcggtacccactcaagcggttcgctcaggggctagtccacttgctgaagctgatcctgatggattgttaggtaggaaagagcagcccaataatgtgatgcaggtgacacaactggataataaagggaatggcccttcagtcatgactgagagactctctgacgatggatataactggagaaaatatggacagaagcatgttaagggctgtgaatttccacgcagctattacaaatgtacctatcctaattgtgaggtgaaaaagcttttcgaacgtgctcctgatggacatattacagagattatctacaaag

SEQ ID NO: 1239 - DNA, 489 bp, Eucalyptus grandis
ctcagatgtgggacaagctgagggagattaaaaattcattgcttggacctgaatctgatatcagtgatagctgcaattgttgcttaaatagtgggagccaccaattcacgtcaactgggcagtgggatgtacgtcagatgatagagatgatccctaaaattggatttgaaggacatgctgattttctgtgcacaagcagttgccgaagctgacatgcctaagacagctgctttgatggaggtgttagagaggatggtgtctgtctcaggagatccaatccaacggttgggtgcttacttattagaagggcttagagcgaggttggaatcatctgggagcataatctacagaaagctcaagtgcaaagagcccactggctcggaattgatgtcttacatgtccatcctctatcagatttgtccatactggaagtttgcctacgagtcggcaaatgttgtaattggggaagctataaagtacgagtcaaga

SEQ ID NO: 1240 - DNA, 306 bp, Eucalyptus grandis
  misc_feature (14)..(14): n is a, c, g, or t
gccaacgctcaccnccttggcagctgaggcagcggcggcggccgaggaggcagcagtgagggcctcgtagtggcaccgcttgtgcccgccgagagcgtggccggtggggaagctcttgtggcagatcgccggaggaggtggttgccgcggaggtctaggtggccggttgttcgtccgcgccggcgaagagaaagtgtgctggggagagagagagcgtgcagagaggtagaagagagagaagagagaggagagagaacgtgaaaggaggcagaagagagagagtgcagcgaggggagagagaggaca

SEQ ID NO: 1241 - DNA, 366 bp, Eucalyptus grandis
gagcattttcttcatccttacccaaaggattctgacaaaatcctgcttgcaaggcagacaggcttgacaagaagtcaggtctcgaattggttcatcaatgcaagagtgcgtctctggaaacctatggtcgaagaaatgtacaaagaagagattggggatgcggaaatggactccaactcatcctccgacacagccaagccaaaaacaggagatatcaagtcctccatggaggaccgggtggaagaagtgcaacagagttcaacagctacacagagatgcagctcaggccagctcatggactcatcattcgaccggactccagatgtcgaaatggcaggccactctgtgggattcaactacctgaac

SEQ ID NO: 1242 - DNA, 340 bp, Eucalyptus grandis
cttcggcctcgtcgaccaccggaatggcatgggcgtcgcgaacgccggcctcgtgtacttcgacggccacctcctcgcgatgtccgaggacgacctcccctaccacgtgcgcgtcacgcgctccggcgacctcgagaccgtcggccgctacgacttcgccggccagctcgactctccgatgatcgcccacccgaagatcgacccggcttccggcgagatgttcgccctcgtcaagtacttccgattctccaaggacggcgagaagtcccccgacgtcgagatccccctggctgagccgaccatgatgcacgatttcgcataccgaacgctttgtcgtgat

SEQ ID NO: 1243 - DNA, 684 bp, Eucalyptus grandis
ctctctctccctctcccccctaacgtttctggccctcttctttgtctggacaaaaagatgggaagaaagtgctctcgctgtgggaacataggccataactcaaggacttgcacaactttcatgggggcagcaagttcttgtgggctcaagctcttcggtgttcaacttgacctatcttcttcttctcctccttcatcatcagcatctagtggttctgctcatccttattcacttgtcataaagaagagcctcagcatggatcgtctgtcttcttcctcggcctcctcctcgtctccatcttcatccctctcctcgccaagagttcttgctgatgaacactgcaataagacctccctcggatatctctctgatggcctcgccgccagatcccaggagaaaaggaaaggagttccatggacggaagaagagcatcggacattcttaatggggctagagaagatggggaaaggcgattggagaggcatctccaggaactatgtgaccacgagaaccccaacccaagtcgcgagtcatgcgcaaaaattctttctccggcaggccagtcttaataagaagaagcggcggtccagcctcttcgacatgggtagttttcggtaaccatgtcacaaatccatacattaattgggcaccaaactcaccgaaagaaaactcagagtcttttca

SEQ ID NO: 1244 - DNA, 329 bp, Eucalyptus grandis
cggccccgcagcttggtcggcgtacctcagaaatggctcaaatggtttgtggttcctgccaaagattgatttcatatcagccaggagccaaatatgtgcaatgcttatgctgcaagacgattaactttgtgttggaagagcatctggttggacaagttaagtgtggtacatgtgcgatgttgcttatgtacccgtatggcgctccagcagtcaagtgttcggcctgccgttctgtgacagaaattggggagcacaacaaaaggaccccatgggcggtacagcaagggagacttccccctcccagtacagttccttgatgggcacacgca

SEQ ID NO: 1245 - DNA, 383 bp, Eucalyptus grandis; identical to SEQ ID NO: 279

SEQ ID NO: 1246 - DNA, 380 bp, Eucalyptus grandis; identical to SEQ ID NO: 111

SEQ ID NO: 1247 - DNA, 360 bp, Eucalyptus grandis
gcagccgagtcgagcaagaaactaacgaacgcccggtgtcattaggattcataatccacaagaacaaaagaaaaaaggatcatgggaagatccccatgttgcgaaggcaatggcctgaagaaagggccctggtcttctgaggaagacaagaagctccttgattttatccagcagcacggccatgggagctggatctctctccctaaacgtgcaggtcttaatagatgtggcaagagctgcagattgagatggataaactacttgtggccggacatcaagagagggagtttctccccggaagaagaacaaaccatcttgcatctccactccgtgctcggaaacaaatggtcggcgatcgca

SEQ ID NO: 1248 - DNA, 351 bp, Eucalyptus grandis
tttttttttttttttttttgaaagtaaacgaatttaagattaaattaaatatggggaacccagctagctagtcaagtttgaaaatgttgtgccaatttctgtttctttaatacaaagttggggaaaacaaaatttacatccgctcaaatttgaggtaaaaaaaaaccctatctcctccggctttgacttgtcagccgccctcaggttgacttgaataccaggttcatcgcaccggcgggcacaatctcctgcgacgcgggctgggagtgacgatgctccccctcgtacgtcacgatcagcatcgttggatcgtcgggggccctctccacgtgtttcctcgcggggcaccct

SEQ ID NO: 1249 - DNA, 419 bp, Eucalyptus grandis
gacgagatgatgatgaagaaggggagcgacggagggatagcggaggtgaatcccacgccgaagaagggggtgacgtccaaggttgtggactacattgagaagctgatcgtgaagttcatgtacgactcctctctgcctcaccaatacctcgccggcaacttcgctcccgtcgccgacgagacccctcccgtcaccgacctccccgtcgtcggccatctccctgattgcttgaatggagaattcgtccgggtgggccccaatcccaagtttgccccggtcgccggataccactggtttgatggagatggcatggttcatgggatgcggataaaaaatggcaaagctacttacgtctctcgctatgtgaggacgtcgaaacttaagcaagaggagtactatgggggagctaaatttatgaa

SEQ ID NO: 1250 - DNA, 632 bp, Eucalyptus grandis
ccccccgcgacgaccggacggccagtccagattccctcgccgtcgccgccgtgaaacgccggagcgcacggcgcacggacccgacggacgccgtcctccgccaccgtcgccgaggttgagagccatgtcgagcgacgcgcgcgccgcctccggcgccaccgccgccggcgccggggagttcatgctgttcggggtcagggtggtggtggtggaccccatgaggaagagcgtgagcctgaacaacctgtcggagtacgagcagccccaggacgcggcccccggcggcggcggcgtcggcaaggacgacgcgggagcggccgcctccggctacgcgtccgccgacgaagccgtcgcgcacggctcgaaaggcgggccggccgcgagcgcaagcgaggagtcccgtggacggaggatgaacaccggctgttcctgctcgggctacagaaagtaggaaagggcgattggagaggcatttcgaagaactttgtgaagactcggacgccgacccaggtcgcgagtcatgcccaaaaatactttctccgccggagcaaccttaatcggccgtccgccgccggacttagccttgtttgacatcaccacccgatacggtcactggttggtacaatgatgga

SEQ ID NO: 1251 - DNA, 202 bp, Eucalyptus grandis
atgcgaaacatgctcaaacacccccaacatcatgggaaggtggaagtggggctgattcggaggttaacatgttgaaggattacgcttcagaggactggattacaggtgttgaccgcttccggttgagcttggttgaatttcttgataagttgaataagtatgcggagtcctctgttcatatgtacgtgtcccttgaaaaggc

SEQ ID NO: 1252 - DNA, 378 bp, Eucalyptus grandis
gagataaagaactactggaatacaagaattaagcgactgcaacgcactggcatgcctatatatccaactgaggtttgtctgcaagtgtcaagtgagaatcaagaaactcataacatgggtaacttgcatactgcaggcgaagataattgtgatctctcacaggcagatccactcgagatcccagaggtggattttagaaaactggaactgcatcttggtttctcgtctttttggtctacacttctggacgttcctccttgtggctttgggagagaggcaatgtgtctatctgatgcttactgccttccatttccatcaagccggtctcctaaacgccttcggggttctgagaccccatttcctgtcttggatgctgga

SEQ ID NO: 1253 - DNA, 388 bp, Eucalyptus grandis
gtgattttagtgctcgatactttgaaaagggcatcaatacagtcaaacgagataaaaagacataacatgcaaaactcaatacatgattctcagaaaagaccatcatctttaattcagtcaaacgaggctgtttttacgcaaacttcggtcataagctgtgccttgcaatcgtttgttaaacctccaaatgctaaggtcacggtcacattcctctctgatctttgagcagctcatggcaccaacgtccaaggaacatttcttaaaaaggatgatccaaaagttactgctctgattcaacaagccgagctgctcagttcccttgcggtgaaagtcaatgcagataacatggaccagagtcttgaaaatgcttggaagggtctccaggaat

SEQ ID NO: 1254 - DNA, 380 bp, Eucalyptus grandis
cgacgatcgggtcgggtcggttcgggcgtcgccatgacgcggcggtgctcccactgcagccacaacggccacaactcccggacctgccccgcccgcggcggcggcggcggcggcgggggaggcggcgtgaggctcttctgggtgaggctgacggacggctcgatcatcaagaagagcgccagcaccagcagcctctcgtcccaccacctcctccccccctcctcctcgccgtcgccttcgccttcgccgtcgccgtcgccggccgcgggctcgccgccgtcgggcgaccaccactacgaccaccaccaccaccagcagcgcgacccggacgggtacttgtccgacgatcccgcgcaaggggcctgcgcgtccgatcgccg

SEQ ID NO: 1255 - DNA, 350 bp, Eucalyptus grandis; identical to SEQ ID NO: 113

SEQ ID NO: 1256 - DNA, 377 bp, Eucalyptus grandis
tctcaatgggattagcggaaagaagaaccaccagagggaggattcagaatttgaagatgagaggagtaacaagcagacagcagtgtatgttgatgacaccgagctatccgagatgatggataaattgttggtctgtcatattaaaggcaagagtcgagattcaaatgctgatgaatcctctaaaaaagaagtaagtaaatctttacagcagaatagacagacacacactgctgatggtgggaagtttcataataagaaaccaaccccaaccagcaatatgacagagatggtggatctcagaactttgttgatcctttgtgcacaagctgtctcttctgacgatcgaaggactgctaatgactatctaaggcagattc

SEQ ID NO: 1257 - DNA, 651 bp, Eucalyptus grandis
actcgtggcgctgtttcgagctttctagcttccggaggaggagggctggtgttgagcgaaacttggagaggtcatgaattcgacaaccactcagtttgtgtcctctagaaggatggggatgtatgacccgattcaccaaattggaatgtgggacgagaacttcaagcagaatggaaatcctaatgcgccgccagctctgatcatacctatgcacgcgaatttggacaaccagtcggaggatacttctcatggatcacaggatactgctggcaagtatgagcaagaaacatcgaaaccttatgataaggtgcaaagacgtcttgcccaaaaccgtgaggctgcgcgcaaaagccgtctgcggaaaaaggcttatgttcagcagctagaagcaagtcgtttgaagcttatgcagttagaacaagaggttgaccgagctaggcaacagggtgtgtacatggcttcaggagtagattcagcttatccaggatatggtggatgtttaaattcaggaatcgttgcatttgagatggagtacgggcactggattgatgaacagaatagacaaatatgtgagctgagggctgctttgaatgatcatagaactgacgtagagcttcgcatcctcgtggaaagtggcatgaaccactattc

SEQ ID NO: 1258 - DNA, 311 bp, Eucalyptus grandis
gacgagatgatgatgaagaaggggagcgacggagggatagcggaggtgaatcccacgccgagaagggggtgacgtccaaggttgtggactacattgagaagctgatcgtgaagttcatgtacgactcctctctgcctcaccaatacctcgccggcaacttcgctcccgtcgccgacgagacccctcccgtcaccgacctccccgtcgtcggccatctccctgattgcttgaatggagaattcgtccgggtgggccccaatcccaagtttgccccggtcgccggataccactggtttgatggagatggcatg

SEQ ID NO: 1259 - DNA, 588 bp, Eucalyptus grandis; identical to SEQ ID NO: 325

SEQ ID NO: 1260 - DNA, 620 bp, Eucalyptus grandis
tgaaaatcgtattgtcctctttcgtcttgatgcgttgaagaactaaaagaaggagccacaaacactgaggaataaaccttagaactaccaaataaggagagcccacgggactcgttttcttgtatgccacaacggtccgaaccttcttttggtgaggccggggagcaaactatcgtttcttcgacgagggtattgacatccttcgaaccacctgcactcctcctgttccgatccggccatggatgattgagaaaagagttgagaactgatgacgatgacgatcttgcttgttgctgcttcatatttgcatgctggagaatctggtcgactttcggatgctgccctacgaagctgcagttcacctcggggtgattaccgatcagctggtggcacgggaagttcgtcttcgcgttcctccctcggagaagccaggccgcgctgtcgtaagccaaggcggcttcctcggcgctattgaaagtgcccagccacagcctcagcttcagcgtggagtccttgatctcggcgacccatcttcccgaaggcctttgtctcaccccgagaaaccttctcattgcatcatcacccttcgctcttctcttgatgttcttcctcatggctat

SEQ ID NO: 1261 - DNA, 562 bp, Eucalyptus grandis
gataaatcgtcttcaccagtacctccgcaggatcagacgggtgttcatgtttatcatcctgattgggctgctatgcatgcatactatggtccaagagttgctcttccgccttattataattctgctgtatcatctggtcatggtcctcatccctacatgtgggggccaccacagcctatgatgccaccatatgggccaccttatgctgcaatatactcacatggaggtgtttatggacatcctgcaattcctcttactccgactcccttggctgcggaaactcctaaaaagtcatctgctaattctgataatggactggtgaagaagttgaaaagttttgaagggcttgcaatgtcaataggcagtgggggggatgcagacagtgctgacgatgggactgataaaaggtcatcacagagtgcagactcgggagactcaagtgatgaggatcaatcaggggcagataaagccaggaggaaaagaagccgtgaaggaacttcatccaatggcgatggaaaatctgaagtgcaaggaaaggctgctggggaggtggatgctgttt

SEQ ID NO: 1262 - DNA, 384 bp, Eucalyptus grandis
gacgagatgatgatgaagaaggggagcgacggagggatagcggaggtgaatcccacgccgaagaagggggtgacgtccaaggttgtggactacattgagaagctgatcgtgaagttcatgtacgactcctctctgcctcaccaatacctcgccggcaacttcgctcccgtcgccgacgagacccctcccgtcaccgacctccccgtcgtcggccatctccctgattgcttgaatggagaattcgtccgggtgggccccaatcccaagtttgccccggtcgccggataccactggtttgatggagatggcatggttcatgggatgcggataaaaaatggcaaagctacttacgtctctcctatgtgaggacgtcgaaacttaagc

SEQ ID NO: 1263 - DNA, 381 bp, Eucalyptus grandis
ccgcgccactccattcgcgcatctccgacctcctctctccacgcggccactgtcccgtcgcgcgaattcgccccgccgtcgtaggagaccgcatcctccgccgccgcggcgatggccccagcttcattccctgcgctagcaacgcatttcaatggaagtatgctaatgatactaactcatctggtgaaagtcacacacgtaatggaaggccacgaggagatgccaggggaaggaatcaattacttcctcgttactggcccaggataacagatcaagagctacaacaaatctcaggagactcgaactctgtaatcactcctctgtttgagaaaatgttgagtgctagtgatgcaggtaaaattggacgtttagtgctgccaa

SEQ ID NO: 1264 - DNA, 316 bp, Eucalyptus grandis
ccgagaagaggacccccaagaagagagggaggaagccaggcctcggccgcgacacgccgctgaaccacgtggaagccgaacggcagcgccgggagaagctgaaccaccgcttctatgcgctgcgagcggtggtcccgaacgtgtccaggatggacaaggcgtccctgctctccgacgcggtgtcctacatcaacgagctcaagtccaagatcggcgatctggagtcccagttgcagagagagtccaagagggtcaaacaggaggtcaccgacgcaaccgacaacctgagcaccaccacctccgtcgaccatagtag

SEQ ID NO: 1265 - DNA, 356 bp, Eucalyptus grandis
tcaggctcccacgccgttccattcgcgcatctccgacctcctctctccacgcggccactgtcccgtcgcgcgaattcaccccgccgtcgtaggagaccgcatcctacgccgccgcggcgatggcggcgccacgaggagatgccaggggaaggaatcaattacttcctcgttactggcccaggataacagatcaagagctacaacaaatcttggagactcaaactctgtaatcactcctctgtttgagaaaatgttgagtgctagtgatgcaggtaaaattggacgtttagtgctgccaagaaaatgtgccgaggcctattttccgcctatttcccagcctgaaggattgccgctca

SEQ ID NO: 1266 - DNA, 360 bp, Eucalyptus grandis
gcgcgcacgagacatgggacgatccccttgctgcgagaaggcgcacaccaacaagggcgcgtggaccaaggaagaggaccagcgcctcatcgactacatccgcctccacggcgaaggttgctggcgctccctccccaaatctgccgggcttctcaggtgcggcaagagctgcaggctcaggtggataaactacctccgccccgacctcaacgcggcaacttcaccgaggaagaagacgagctcatcatcaagctccacagcttgctcggcaacaagtggtctctgatcgcggggagattgcccggaagaaccgacaacgagatcaagaactactggaacacccacatcaagcgcaaagct

SEQ ID NO: 1267 - DNA, 375 bp, Eucalyptus grandis
cgcccacccctcctcgcagcccagcgctgccgctcacttcagtcaaggggtaccctgcccgcaacagcatttccgagtatgacccgcgaaggcgtaactcaattcccgcagaatactttactatgggctttactccctctgctcccatttaccctcccatctctccactgcacccgtccacacaactccctgctgtgacgcaggctcggccctcgggtgagtccaaaggggacccaagaaagaagtaccaatgtgccgcctgcccgcgtgcatttgccagggcttacaatttaaagacccacatggcaacgcatgaccccaacaggctgaagccccatgtctgcccccatcgttcttgcggccgttccttcagca

SEQ ID NO: 1268 - DNA, 567 bp, Eucalyptus grandis
gacgagatgatgatgaagaaggggagcgacggagggatagcggaggtgaatcccacgccgaagaagggggtgacgtccaaggttgtggactacattgagaagctgatcgtgaagttcatgtacgactcctctctgcctcaccaatacctcgccggcaacttcgctcccgtcgccgacgagacccctcccgtcaccgacctccccgtcgtcggccatctccctgattgcttgaatggagaattcgtccgggtgggccccaatcccaagtttgccccggtcgccggataccactggtttgatggagatggcatggttcatgggatgcggataaaaaatggcaaagctacttacgtctctcgctatgtgaggacgtcgaaacttaagcaagaggagtactatgggggagctaaatttatgaagattggagaccttaaagggctttttggtttactcatggtcaatatgcaaatgctgagagcaaaactgaaaatactagatgtttcatatggaacagggacaggcaatactgcactcgtatatcaccatggaaaactgttggcgctttca

SEQ ID NO: 1269 - DNA, 567 bp, Eucalyptus grandis
tcgccacctaatgcatgcactgaatctgcagttgccaccattagacccaaaacggtgaggtttaagccagtgccaaatcgagctccaactgcagtgaattcatcccaggcagaagtctctggaacagcaaccggcaattccaatgataaggctttaaagtcagatgaaaagcctaccgtaatatacaaaccattggcaaagcttgtctcaaggtcaaccgtctcgctcttggctaatatgggaagcttcaatatggctcaccatcaaacattgtcagttgccgaagcacgtgttaaatctcaactgcaggacaaaaacaattcgagatcccagcctattggaaatctccatcggagtgtctcttcacaagcagatatggatgggacaagtgaacccttgagattggcctcccagaacatggaagaagacacgagaacttcaccggccttgaacatggatcgcccttcttacgatggatataattggagaaaatatgggcaaaagcaagtcaagggaagcgaatatcctagaagttactataaatgcacacacccaaactgcccggtg

SEQ ID NO: 1270 - DNA, 325 bp, Eucalyptus grandis
gcggggtgtacgtccggaacggcgccaacccgctccacgagccggtcgccgggcaccacttgttcgacggcgacggcatgatccacgccgtccggttctccggcggctcagtgagctacgcctgccggttcaccgagacgcaacgcctgatccaggaacggggcctcggccgccccgtcttccccaaggccatcggcgagctccacggccactccggcatcgcgcggctcatgctcttctacgcccgcggcctcttcggcctcgtcgaccaccgtaatggcatgggcgtcgcgaacgcgggcctcgtgtacttcgacggccacct

SEQ ID NO: 1271 - DNA, 365 bp, Eucalyptus grandis
cacaggcgcgatcgggccaagcgagcgtcccccccgggaattcagaacccagccgccgcgccccgccgccggcagccgccgtctccggcgcccctctccggcacctccgacgccgcccgcgtccggagcaccctcgacccttcgattcggaggctggttcgctgaggctcgaggcgacgcgaattgttatcgatagctatgcagagtcaacttgtctgtaatggctgtcgaagcattcttctttatccaagaggggctacaaatgtttgctgtgcattatgtaacacaataacctctgttccttctcctgcatatgtaggtgcagatatggcccagcttatatgtggaggttgcaggacactgct

SEQ ID NO: 1272 - DNA, 365 bp, Eucalyptus grandis
accgtgcccgcgatgcaacagcatggataccaagttctgttactacaacaactacaacctgaatcagcccaggcacctctgcagaaagtgccaacggtactggactgccggaggaacgatgaggaacatccctgttggcgctggccgtcgtaagagcaagaattcgtatgcagccacggtggcactgtttcacaacacgggagtacctgaatctcttcgagctgattgtgctggtgatttgaaaaccgccggaaccaccatcctgaggttcggttcagattctcctaattggggtcaatctgcagctccagtgccaagtactataaacggatttcttgatcctggacgaacaattccatgttctg

SEQ ID NO: 1273 - DNA, 328 bp, Eucalyptus grandis
  misc_feature (11)..(11): n is a, c, g, or t
aacaaatcagnggaagaaaatatgcagcatttgaaggacgaagctgcgaacatgatgaagaagatcgagctcctggaagattcaagaaggaagctccttggtgaaggtctaggatcatgctcgatagaggaactgcaacagatagaacagcagctagaacggagtgttatcagcattcgtgctagaaagactcaggtcttcaaggagcagattgacaagcttaaagagaaggagaagatgttgacagctgagaatgcaatcttaactgagaagtgtggaatcaagcccccacaaagagcaaatgagtgcagggatagtccacttctca

SEQ ID NO: 1274 - DNA, 390 bp, Eucalyptus grandis
cttaccgagcactcccctcctgattctaactcgtccattttcgttggtagcagtacatcattggctaataagcctaaatacagagatatccaagcaagagaagccacaagtggttcatcccgccaacactcagatgaagatgatgctgcgacagtggcagatccaagcgaacagagcagatatcctactgatcccaagcgaattagaaggatggtttccaatagggagtctgctagaaaatcacgtaaaaggaaacaagcacacttagccgaacttgaaatacaggctgaccgacttagaggagaaagttctactttgtttaagcaactattagatgctgcacagcactaccgccatgctgatacaaataatcgagtgctgaaatctgat

SEQ ID NO: 1275 - DNA, 384 bp, Eucalyptus grandis
gaattacacccaaccaaaccaaaagagtcataattcaggatccaccttgtttagttaagcaagaataattttcccttcccttttctctttttgagccctttagagttacatgtcttgggtagcaatgacggggaactttgggtggggctcaaactccatggaagaggcgtggaggaaaggtccctggactgctgaggaagacaagttactcattgagtatgtgaagttgcatggggaaggaagatggaactctgtagctaggctcacagggctcaagaggaatgggaagagctgtagattgaggtgggtgaattacttgaggcctgacctgaagagaggtcagataacccctcaagaagagagcgtcatcctagactcccgcta

SEQ ID NO: 1276 - DNA, 382 bp, Eucalyptus grandis
gtcgaccgagtggaagagaggttggcccctccgatctggtcaactcgccaccctctgcgataagtgcgggtctgcatttgaacaggccacgttttgcgaagttttccactcgaaggactccggatggagggagtgcgcttcctgtggcaagcgcctgcattgcggatgcattgcttcgaggatgctgctggagctgctcgattgtggcgggatcaactgcgcgacctgtgcgaaaagttcaggacttctgcctatcgcaagtgatgagaggcctagtgagtttggcatgattaatgttcgtactggtgaactgcaatctagtaccacagacaaccatttcgatagcgacgaggttgataaactgaagcttattcgattgaga

SEQ ID NO: 1277 - DNA, 367 bp, Eucalyptus grandis
ataagatcggatctttcctgctttggcgacgccggaaacccgaattcagtgcccaaacagtagtcgaccgaccgaccgaccgaccgggaagttccgatcatggccgtggagatgtttcaagagccggagtcggcgttcctcgactccgtccggcggtacctgctgtcggaggactccgagtgccggttcttcgagccgccgccgccgccgacccggaacttctgcggcgccggagccccggtgatctgcgggagctccagcttcagcagcctgtacccgtgcctgaccgagaactggggcgagttgccgctcaaagaagatgacccggaagacatggtcctctacggcgtctccgcgacgccctcac

SEQ ID NO: 1278 - DNA, 384 bp, Eucalyptus grandis
  misc_feature (234)..(234): n is a, c, g, or t
cacgctcatcggtctgccagaaactcacggagagagagagatggcggagagagaggagaaggggaagtacgacgagatgatgatgaagaaggggagcgacggagggatagcggaggtgaatcccacgccgaagaagggggtgacgtccaaggttgtggactacattgagaagctgatcgtgaagttcatgtacgactcctctctgcctcaccaatacctcgccggcaacttcgntcccgtcgccgacgagacccctcccgtcaccgacctccccgtcgtcggccatctccctgattgcttgaatggagaattcgtccgggtgggccccaatcccaagtttgccccggtcgccggataccactggtttgatggagaaggcatggt

SEQ ID NO: 1279 - DNA, 368 bp, Eucalyptus grandis
cacggcggcgccgccgggtttcttgggccgagggccgtgccgatgaaacaggcaggtctcgcccagaagcccacgaagctgtaccggggagtgaggcagaggcactgggggaagtgggtggccgagatccggctacccaagaaccgcacccgcctctggctcggcaccttcgacacggccgaggaggccgccctcgcctacgacaaggcggcgtaccggctgcggggtgatttcgcgcggctcaacttcccgcacctcaagcacaaggggtcgcacatccagggcgacttcggcgactacaagccgctccattcctccgtggacgccaagctccaggccatctgccaggacatggccgagaaaccagc

SEQ ID NO: 1280 - DNA, 341 bp, Eucalyptus grandis; identical to SEQ ID NO: 267

SEQ ID NO: 1281 - DNA, 295 bp, Eucalyptus grandis
tgactttcaatgagtttcagaacacatggagtggactttctaaggatattggatccatcaacatggatgagttcctgaagaacatatggacagctgaggagagccaactacagctacaagacatggcgccttctggtaatggaggggaaggaggtggtcaagtagggaatttgctgagacaggggtcattgactctgtcgcggactattagtcaaaaaacagttgatgaagtgtggagagaattattcaaagagacggaggatgtgaaagaagggagtagagaaggaggtgacat

SEQ ID NO: 1282 - DNA, 365 bp, Eucalyptus grandis
  misc_feature (330)..(330): n is a, c, g, or t
  misc_feature (354)..(354): n is a, c, g, or t
ttttttttttttttcaagctaagatcaaaccaaaattaaaaaagaatttcacagtatttttatgcaaatgcaatgacaccttatcaaggtttaccaaatgttgaaacaaattatacacacggcctgaggcatccatgaaatcacgcaggcaaaacccgcggctcattttcacgactgcctacctgctcgcgggggttattcaaagcctcgaataccttagtgcaagcacctgagaattccatcaatgccttaaaaacgcgaggcaggccgttcttgagggggttcagtgccatggccttggtgaactcgaccgaaaccgcatacttggcnttcacatcgtccaaccgttttttnagggcctcgat

SEQ ID NO: 1283 - DNA, 428 bp, Eucalyptus grandis
ctccggcgagctcaaactgttcatgaccacgtcgccgtcctcgtaatccttcgcactgatctcttcgccgccaccgcctgccccctcggcctcctccacttcctcccctgcttccccattgccaaacgccctcgccgcctctgccgccgctgcctgtatctctgctgcgtccgtggactccggcacgcggagccgccatgccgagtcggcgaaattgaggcacgcgccccgcccgcggagcgccagcgcagccacgtcgtgggcccgggcggccatctcgggggtcgggtacgtcccgagccatatccgggtcttcttgttgggctcccggagctcgcacacccacttgccgttgttcctgcgccggaccccccggtacacggggtggcgggtctccttgaacacgacccgcccggcccgcttcttcg

SEQ ID NO: 1284 - DNA, 532 bp, Eucalyptus grandis
ggaaaagagaaggcagctttcccgtataaaacccaaacccctccaaattctccccccaattctccagccagggaagggcgagggcggcgacggcgacggcgacgatcatcccatctccgaccagctgatccttccgctccatcgtcgtcatgtacggacgggcggcggagtggagccgctacgaggacaaggtcttcgagcacgcgctggtggcggtggcggaggactcgcccgaccggtggcagctgatcgggaaccgcctgaaccggtccgcgtcgcaagtgttcgagcactaccagaggctggtggaggacattgacgcgatcgagtcggggcgggtcgagccgccgagctaccgcgacgaccacccggcgagctgcggccagattgccttcgagacgaagccccggatcaaggaggcggagaagaagaagggcaacccgtggaccgaggaggagcacaggttatttttgctcgggctgcagacctatggcaagggcgactggaggagcatctcgaggcactttgtcct

SEQ ID NO: 1285 - DNA, 349 bp, Eucalyptus grandis
aaagtcccgagatgccgcgacgcgaattcccctctcgaatgcgctcggaattcgagcgatgatcggagcggcgaccaaccagatcccgccgccgccgccgccgccgcagccgcagcaagccgcgcccgccgccgccgcgatccggttccccgactccgtctacaacgcgctcagggtgggcgccgtcttccagcggctgtcgaagcacctcgccaccatcggcaagggctccggcctgtcggcatcttgcggtacttccatggagttcctgaactcgtgcctctgcctcgccagaggcattgactatgcggtcgcgaacaatgaggttctgcccaaagctcacgaattg

SEQ ID NO: 1286 - DNA, 350 bp, Eucalyptus grandis
cttctgcgagctagggtttctctcgctcctcctcctctctaggccgtgatttctcctcccctcgatcggcgacgtcgccgtcggttcggctctccggtagctcctgctcctcccggctttcatggaggctaaggtgatggaagacgctagcaagtccgaggctcactccatatcggctgcggccttcgtggaaggtggagtccaagaggcctgcgaggatgcttgcagcatctgccttgaagctttctgcgacagcgaaccatctacggtgaccacttgcaagcacgagtatcatctccagtgcattctcgagtggtgtcagaggagttcacagtgtcccatgtgttggc

SEQ ID NO: 1287 - DNA, 344 bp, Eucalyptus grandis
gaaggttggaacatctggtggagcaggcccttgtcctgcaaacagatgcatgtatgcttcataactctatagatatggaaatgtcactgtacactgatcatcaatgtggtaaagaacacatcccctgtcgaactttgcagattttacaatcacataatgatgaagtttggcttgtgcaattttcacataatgggaaatatttagcttctgcatccaatgatcgatcagcaatcatttgggaggttgatgagaatggcagcgtctcattgaagcataaattgactggtcaccagaagccgatttcttctgtctgttggagtccagatgaccgacagcttctcact

SEQ ID NO: 1288 - DNA, 359 bp, Eucalyptus grandis
aacatcttctggctaagcgcgttcagcatcactctcaactactggcgtgaagatgttcaaaggcaaactttcttatctcagaggctaaaagatgttccacccatggcttcttaatctgatccagatgaaccgtggagaaacaaaatcgaagtctcatcaaaaggatcctgattgacctaagaatgacaaggcaaccattcttacggacaaaatccaggtgctgaaggatttaactacggaagttaacaaattgaaagctgaatgtgcagctcttattgaagaatctcgtgagctgatgcaggagaagaatgagctcagagaagagaaatcatctttaaaatctgaagttgaaaatctta

SEQ ID NO: 1289 - DNA, 381 bp, Eucalyptus grandis
tggatccaaagaattcggcacgaggctgcctccaccaccaccgccgtccccaccgccgccaccaccaccaccaccaccaccaccaccttatactgtacaaataatcccttggcctcggccgttatagcctcttactcaaaaatcagtttttacccttttctgttgcgtagtcgtagttttgggccaggggttctattcggtatatgtagagaagtcagtgggcgaaaccgagcgtcgagcggtcggccatggcttcctcttcttctgtagcttccgcgaggaaggacgcggatcggatcaaggggccgtggagccccgaggaggacgaggcgctgcagaggctggtccagagctacggcccccgcaactggtccctgatca

SEQ ID NO: 1290 - DNA, 330 bp, Eucalyptus grandis
ttccaatcttcccttcccttcccatcgcacctctccaaagattccacctttcgtctctctctctcgaagcccaaaccctctcgatctatattgccctcctctcctccgttcatccctcgcaaaaccagacccccggatcagccccgaaagaaggtcggacaagcaagatggcggaagagcaccggtgccaggccccgcgcctctgcgcgaacaactgcggcttcttcggcagccccgcgacgcaggatttctgctccaagtgctaccgcgacctccagctcaaggagcagcagtcctccaacgccaagctcgctttcaaccagaccctgt

SEQ ID NO: 1291 - DNA, 296 bp, Eucalyptus grandis
gcagccgagtcgagcaagaaactaacgaacgcccggtgtcattaggattcataatccacaagaacaaaagaaaaaaggatcatgggaagatccccatgttgcgaaggcaatggcctgaagaaagggccctggtcttctgaggaagacaagaagctccttgattttatccagcagcacggccatggagctggatctctctccctaaacgtgcaggtcttaatagatgtggcaagagctgcagattgagatggataaactacttgtggccggacatcaagagagggagtttctccccg

SEQ ID NO: 1292 - DNA, 355 bp, Eucalyptus grandis
  misc_feature (199)..(199): n is a, c, g, or t
gccaagaccctggccggccacaaggccgccatctccgccgtcaagttctcgccggacggcaacctcctggcctcctcctccgccgacaagaccctccgcgcctactccaccgcctccctcgccccgctccacgacttccacggccactcccagggcgtctccgacctggccttctccggcgacacccgcctcctcgccncgcctccgacgacaagaccctccgcctctgggacgtccccacggggaccctcctcaagaccctcacggccacaccaactacgccttctgcgtcaacttcaacccccactccaacctcctcgtctccggctccttcgacgagaccgtcccgcgtctg

SEQ ID NO: 1293 - DNA, 362 bp, Eucalyptus grandis
cccctctaccccccaagccccccaagccgtcctcgtccaccctcagctcccgccgcccggccatccaagtcgcggtccccgcggcgacgagcttcctggcggcgccggctgtcccccgggccgagccgtcgggctccgctggcggcgacgacgacaagcactaccggggcgtgcgccggcggcgtgggggaagttcgcggcggagatacgcgacccgacgcgcaaggggacgcgcgtgtggctggggacgttcgacacggcggtggaggccgcgaaggcctacgaccgcgccgcgtttaggctccgcgggagcaaggccatcctgaacttcccgctcgaggcgggacgcgacgagccgacgt

SEQ ID NO: 1294 - DNA, 360 bp, Eucalyptus grandis
ctctgccgaaccggagaggggccgacaaatgaaaaggaggcggaggaggagatgacgatgccgatgccgatgccgatgatggaccggattagcccgtagagaggaatcggattgctttgccggaacaagagatttcgcgacgacgacgacgacgacgacgacgaatagggaggaaaaagatgcggacgatctgcgacgtgtgcgagaatgctgccgcgatcttcttctgcgccgccgacgaggccgctctgtgccgcgcttgcgacgagaaggttcatctgtgcaacaagctggcgagtcggcatgtgcgcgtcgggctcgccgatcctagtgaggtccaacgttgcgatatatgtgaga

SEQ ID NO: 1295 - DNA, 344 bp, Eucalyptus grandis
cgtctcctccgtcaccctctccctcttcttcctcttctacaagcaccggtcccactatgctggcccgaacctccccccgggcagcatcggcctcccgttcatcggcgaaagcctcgacttcctctccaccgggtggaagggccacccggagcggttcatcttcgaccggatcgcccgctactcctcccacgtcttcaagacttccctcctcggggagccggccgccatcttctgcggcgccgccggcaacaagttcctcttctccaacgagaacaagctggtggtctcgtggtggcctaactccgtcaacaaggtcttcccttcctccacccagacctcctcca

SEQ ID NO: 1296 - DNA, 287 bp, Eucalyptus grandis
gttactacgagagacaaaccaactttgctcctcgtccatccaagattgccaaccctggtgcccttggtctgttctcctttgcatcgacgacgttcattctctccctctacaacgtcaatgcgcgtgacgtaaccacccccaatgttgtgttggcatggccatcttctgtggaggccttgctcagctcctcgctggcatgtgggagtttcctcgcggcaacacctttggagcaacggctttttcctcatatggcgcattttggatgtcgtttgctacgatttatatcc

SEQ ID NO: 1297 - DNA, 557 bp, Eucalyptus grandis
  misc_feature (488)..(488): n is a, c, g, or t
ctctctccctctctctctctccctctgcaagtgctggctgctcagatggctgaagcgagagcacatgggttcgtctacgccagcaagaagaggccggggtccgatgatgccgatggcggcgaggacgcgatggtggtggccaagaaacagatgatctccggccccgtggcgggggtgtgggaggacccagcggaatgtccgccatatcatcggtgctgatgcagctgtgcagcagcggcggacacatcgtggcgtcccaggcgctgtacggcgggacccacgccctcctgacccacttcctcccgagggcgtgcaacatcacgacgacgttcgtggacatccgggaccacgccgcggtggcggccgccgtggtccagggccggaccaaggtgctctacttcgagtccgtctcgaacccgacgctgaccgtcgccgacataccggagctctgccggctggcccacgacaagggcgtgacggtggtcgtngacaacacgttcgcgccgatggtcctgtccccggcccggctcggcgccgacgtggtggtgcacaacatc

SEQ ID NO: 1298 - DNA, 500 bp, Eucalyptus grandis
  misc_feature (207)..(207): n is a, c, g, or t
gggcatactaaggcaatcgattctgtgtgttgggattctactggcgatttaattgcgtctgtcagtgaggactctgttagagtttgggcagttgggtctggtagtgaatgggactgtgtacatgaattgagctgcaatggaaacaaggcccactcctgcgtgttccacccaacttatccttcacttttggtgattggctgctaccanaccctggagctctggaatatggccgagaacaagacaatggctttgccagctcatgacggactaatttcagcattagcagtatcaaatgtgacgggcctggttgcttcagctagtcacgacaagacagtgaagctgtggaagtgatactttggcatctccaggtatttttcctaagcactcagattggaagactgaaatcgctgttcccatcaaagtgcatgtatcttgtccttgtatcaagttgcctcagtacgcccagttggtgtccgtctcactgatactaatttatagct

SEQ ID NO: 1299 - DNA, 444 bp, Eucalyptus grandis
gagacacaccccgcaatctaccggaggcgccacgaccttgtgagcgcacgggcttgctcgttcgatcttgagtcatgaggctcctgtgcctgctcgcgttgatcccgctcgtcgcagcggagtgcacgtgcgagagcgatcccgaggaacgcaacaggacccgggccctcaagtacaagctggccgccatcgcatcgatcctcgtggcgggcgcggttggggtgtgcctcccgatcgtggggaagaccgtcccggctctgcacccggagaggagtatcttcttcatcatcaaggccttcgcggccggggtgatcctgtccaccgggttcatacacgtcctcccggacgccttcgagaacttgacgtcgccgtgcctgagcgagaccccgtggggggatttcccgttcgcggggttcgtggccatgctcggcgcactcgggacgt

SEQ ID NO: 1300 - DNA, 547 bp, Eucalyptus grandis
ggaagctctagggttgtgaagtacattctcgaatctggcaaagtcgatgtaaatagggcttgtggttcggacaaggtcactgcccttcactgtgctgttgccagtggctctgcttctgcggtggaggttgtcaagctcttgcttcacgcatctgccgatgctaattgcattgatggcaatggaaagaagccaattgatgtgatagcccttccattaaagtcacgcggcgattcaaggaggaagctgatggagctgttgctgaaaggcgataattctgatggggaatttgaatcccacgaggagaagccgattgccgcaccgcaagcatccaaagagggaagcgaaaagaaagagtatcaatttcctgttgatatctctctgcctgacataaatgttgggatttacagtactgatgagttcagaatgtatgctttcaaagtaaagccttgctcgcgggcatactcccatgactggacagagtgcccatttgttcatcctggcgagaatgcgaagaggcgggaccctccaagtacccctacaactgcgt

SEQ ID NO: 1301 - DNA, 483 bp, Eucalyptus grandis
cttcgagtttctttcttcactagaattcgctcccgagtctgttgttgctcgtgtagttttgcttactccgtccttcgtttagctcgctgaccagcgcggagctaggagcggtcgctaaaggattactcgtacaaaacgtaaactcagctctgccaattttcccatggagggggaatcttacttcgagaaagatgaaaaatattctaattgctcaatcttgctcgaattatctgcttcggacgatctcccagcttttgaaaggaaagcgaaagagaagggctgtaacattgatggtgctagcttctggtacggtagaagaattggctcaaggaagatgggtcttgaagagaggactcctctcatggtggcttccttgtttggaagctctagggttgtgaagtacattctcgaatctggcaaagtcgatgtaaatagggcttgtggttcggacaaggtcactgcccttcactgtgctgttgccag

SEQ ID NO: 1302 - DNA, 368 bp, Eucalyptus grandis
ctttcttttgcttcccgttaatccctatttcgttatcaacactttaaaagtcggtgaacagtttaaaattggaatgcatcggaagtagtagttcgacaatttcaactttcaggtgctttttgggaaaaaaattcaatatgagaagatgggtaaaatttgttgcaattcattttcagggatgctgcggtggtttgcattttggcgacgtgcttgttcttaatcttgacagtatggtttggagaactcttgcgaccaccggccaaggacctggcccgagggacagtcacagtgctgttcttgtggggcacaggatggttgtgtttgggggtaccaacggctctagaaaggttaatgaccttcatgtactg

SEQ ID NO: 1303 - DNA, 348 bp, Eucalyptus grandis
ccgagctggtgatgtcgtccggcctcgtctgcaacgacgccgtcagctgggtcacgttccacagcgcctacgacttcgggtacctggtcaaggccctcacccgccgcgagctccccggcgacctcccggagttcctcgccgtcgtgcgggtgttcttcggggaccgggtgtacgacgtgaagcacctcatgcggttctgccacagcctgcacggcgggctggaccgggtcgccgccgccctggagctggaccgggcggtcggcaagtgccaccaggccggttccgacagcttgctgacgtggcaagcgttcaggaagattagggacgtctacttcgccaacgacgacg

SEQ ID NO: 1304 - DNA, 349 bp, Eucalyptus grandis
tgactttcaatgagtttcagaacacatggagtggactttctaaggatattggatccatcaacatggatgagttcctgaagaacatatggacagctgaggagagccaactacagctacaagacatggcgccttctggtaatggaggggaaggaggtggtcaagtagggaatttgctgagacaggggtcattgactctgtcgcggactattagtcaaaaaacagttgatgaagtgtggagagaattattcaaagagacggaggatgtgaaagaagggagtagagaaggaggtgacataaatttgccacagaggcaacggactttgggagagatgacattggaggagttcct

SEQ ID NO: 1305 - DNA, 354 bp, Eucalyptus grandis
cgctgacgaggcggcgctctgcgggggctgcgaccaccgtgtccaccacgccaacaagctcgcctccaagcaccaacggttttcccttctctgtccttcccctaaggaattccctctctgtgacgtctgccaggagaggcgagcgttcttgttctgtcaacaggaccgagccattctctgcagggagtgcgatctcccgatacacacggccaacgagcatacccagaagcacagcaggttcttgctcacgggggtgaagctctccaccacgtcggaagtctacacgtctgccgccagcagtgcctctctgtccaacggatgcgatttcgtccccgacttcaaagtccgaagcat

SEQ ID NO: 1306 - DNA, 513 bp, Eucalyptus grandis
caaagacttgctttcctacatgcacattctgtatgagatctgcccctacttgaagtttgggtacatggcggcgaatggagccattgccgaagcatgcaaaaatgaggatcggatacacatcatagacttccaaattgctcagggcacccagtggaccactctccttcaagcgcttgctgcaagacctagcgggcccccttatgtgcggattacagggattgatgacccggtcaacaggtacgctcgtggggccggattggaagcagttgcaggaaggttggcggtgatctctgagaaatttaagatcccggtggagttcaacggtttgccggagtttgccccaaatgttactcgtgacatgcttgatgtcaggccgggggaagctctcgcagtgaacttcccactccagctacaccacacgccagacgagagtgttgacatcaccaatccaagggatgggctactaaggatggtgaaatcgctttctccgaaagtgatcacattgatcgagca

SEQ ID NO: 1307 - DNA, 348 bp, Eucalyptus grandis
agcagctccgcgtcgtgccggggcagcagcagagcccgcggagcgtcgagtcgctgtcctcgtccccgccggcgtcgccgatgtcgctttcgctgtcccggtcgccgttccgggcggacccgatgggcgagatggtcgcctccctcaggaacctgcagctcgacaaagtgaagtccatgccttgcggcgggtccacttccgggtcgccgagggcctccaggatccgaccggggttctacagcatgcccacgacgccgacacaatccaccccgacggcgcgcgggctggggtgcctggattcctgggagagcccttacgaggaagaaccggcgatggagaaggtggaat

SEQ ID NO: 1308 - DNA, 345 bp, Eucalyptus grandis
ggaaaagagaaggcagctttcccgtataaaacccaaacccctccaaattctccccccaattctccagccagggaagggcgagggcggcgacggcgacggcgacgatcatcccatctccgaccagctgatccttccgctccatcgtcgtcatgtacggacgggcggcggagtggagccgctacgaggacaaggtcttcgagcacgcgctggtggcggtggcggaggactcgcccgaccggtggcagctgatcgggaaccgcctgaaccggtccgcgtcgcaagtgttcgagcactaccaaaggctggtggaggacattgacgcgatcgagtcggggcgggtcgagc

SEQ ID NO: 1309 - DNA, 337 bp, Eucalyptus grandis
cattagagctgacccctgaaagtgttaagcatgggtcacaatctggtcaagaaggcagcactccctctatcagttatgaaaagagttcagaggatggatataattggcgaaaatatggccagaaaaatgttaaaggaaatgaatttgtgcgtagctattacagatgcacgcatccaaactgccctgtgaagaaacaagtggagcgctcgcgtagaggccggattaccgataacatctacttaggcgagcataatcatgctagcccacagaagcacctaccagtggctgtcagctttgctgtgtctatagttgaggagaaaccagagaagccttcccc

SEQ ID NO: 1310 - DNA, 383 bp, Eucalyptus grandis
gccccctttactttgttctctctctccccctctctctctcgccatcgaaatcgaagagccgcctctctctctctctctctctcttttccaagaagatcgagaatttggtcacccttcagcatctgacttaagtttagtctgaaggaggggttgcgtgattcccatgtgatgaagtgggaaacgggagttcccttaccaccatgtgcatcgagtgcgaattggtttttcaacgaggagggaaggaccgcgaaatggacccctgccgagaacaaaatgttcgaaaaagcgctggcggtgcacgatcaggacacgccggatcggtgggatagggtcgcctcgatgatccctgggaagacggtggaggatgtggttaagcactatca

SEQ ID NO: 1311 - DNA, 455 bp, Eucalyptus grandis
gttcatcggcggctacggtgcttccacatctaccccttctctttcctccccctcctcttcttcgtcttctctcttctctttcgagcccgtgtcgttctcggatggctgctcgacaagccccgaccctctgggcttcgagctacccggtccgatcgggctcaaccacctcaccccatctcagatcaaccagatccaagcccagatccagttccaaagcacgaacttgccctcctaccatggccacggctaccacccgagcatgcttctgggaccgaagcccgtgtccatgaagatttccgggtcggcgggcaaaccggcgacgaagctgtaccggggtgtgaggcagaggcattggggcaagtgggtcgcccgagatccggctgcccaagaacaggacccgcctctggctcggcaccttcgacacggctgaggaagccgccctcgcctacgaccgg

SEQ ID NO: 1312 - DNA, 472 bp, Eucalyptus grandis
tgcaaaccctagactccgcatcttcgggaggaacgtctcgctcctgcgaaacctcgtaccgcgcttcggcctcgcttgctcgataatggcagattctcctcgcaagaagtattcaagatccccctcaccttggagagagtaatcaaggtctaggtcgagatccaggtctaggtccccaacctggtacaagcaccggccaaggtcacggtccagaagccatggcagatcaagatccagaagtcatggcagatcagtggatgagaacaatcctggaaacgcactttacgtgaccggtttatccactagggtcactgaaagggacctagaagaccacttttcaaaagaggggaaggttgcttcgtgctttctcgtggtggagcctcgcacacgcatctcccgtggttttgcatttattaccatggagactgttgaggatgctaaccgctgtgtcaagtatctgaatcaagtctgt

SEQ ID NO: 1313 - DNA, 384 bp, Eucalyptus grandis
gcacagtctaacctgattacctacaaaggacctaccatgattgcttgtacactgcaagcaatcgccatattgttaaaggagagcttggagtgggattggtttatcaatctcagtgcttcagattatcctctggtaacgcaggatgatctgctttacgtgttctccaacgtatctagaagtcttaatttcattgaacatgatcagatttctggatggaaattgaaacacagatctaaatcaatcatcatcgatccaggattgtacctgtcaaagaagtatgaagtaacctggagcactcaacgtcgatcagttccaacatctttcaagttgtttactggatcagcatgggtaatggtaactcgctcttttctcgagtattgtata

SEQ ID NO: 1314 - DNA, 428 bp, Eucalyptus grandis
  misc_feature (306)..(306): n is a, c, g, or t
ccgcggcgacgacctcctccggcgtctccgggaaggtccacgagtgctcgatctgccacaagagcttccccaccggccaggcgctcggcgggcacaagcggtgccactacgaggcccccgcccccatccccgcctccttctccgccccctccgccgccgccgccccggccgccagcggggtgagcgtgtcggagggcgtggggtccacgcacacgcagagccaggggcaccgcgagttcgatctgaacatcccggcgctcccggagttctcccccaggttcgtcgtctccggcggggtcgacgacnaggtggagagcccgcacccctccaagaagccccggttcctggcgccggcggtgaagacggaagcggcctgaactgggtcggatcgaaaacgcacagaagccaaaccaaaactctgcgagact

SEQ ID NO: 1315 - DNA, 140 bp, Eucalyptus grandis
ccaaggccgcggcggtgcacgagggcgagggagcgaggagcgagctgaagttcataggggtgcggaagaggaagtggggcaggtgggtctccgagatccgcctgcccaacagccgggagaggatctggctcggcttctac

SEQ ID NO: 1316 - DNA, 502 bp, Eucalyptus grandis
gtaaaaaaggggcagccctctgctctgtctgaattgccgtctctcgctacttctctgggcttctttttctttgcttcccttccttaaactctccctctccccgtttcttgtctggtttttctgggtgctctcgcttttcgctgctgaaggagtgagtttgaccgtcgggttcctttcttgatcctccaattcgatcgtcagctcctcgtgtcgacttttttcgggtttcctgtcggcactgttcgattcggattcctcgacggaatggggagtaacatcaacttcaagaacttcagcaccgatccgacgccgacgaataacaggcctcctggcaacacgctgttaacccggcaaccgtcggtgtacacgctgacctttgaggagttccagaactctataggcaaggactttgggtccatgaacatggatgagctcataaagaacatttggtctgcagaggagaaccaatctatggcatctgctagtggcgcttgtggtggcg

SEQ ID NO: 1317 - DNA, 365 bp, Eucalyptus grandis
cgctgacgaggcggcgctctgcgggggctgcgaccaccgtgtccaccacgccaacaagctcgcctccaagcaccaacggttttcccttctctgtccttcccctaaggaattccctctctgtgacgtctgccaggagaggcgagcgttcttgttctgtcaacaggaccgagccattctctgcagggagtgcgatctcccgatacacacggccaacgagcatacccagaagcacagcaggttcttgctcacgggggtgaagctctccaccacgtcggaagtctacacgtctgccgccagcagtgcctctctgtccaacggatgcgatttcgtccccgacttcaagtccgaggcatcgtcctcgttca

SEQ ID NO: 1318 - DNA, 372 bp, Eucalyptus grandis
gtacgataagtattccctctcagtcacccccgccgacgatcctcctgccgaccgcctcctcccccggccgttccgatcctcccggcgacgcgacgacaatggtgaagccgagcggcggcggcggcgatcggggccccccgctggcgccgttcctcagcaagtgctacgagatggtggaggacgaggcgaccgaccccatcatcgcgtgggggagcgccggcgacaccttcgtcatctgggacatcactcaattcaccctccagttgctcccccactacttcaagcactccaacttctccagcttcatgcgccagctcaacatctacggtttcagaaaagttgattcagatcgttgggaattcgcaaatgatg

SEQ ID NO: 1319 - DNA, 363 bp, Eucalyptus grandis
accctgtataatctcaatccttggatttagagaagatttgtccaggacaagaggagccacagatgaagcaatccatgcactgccgacctacaagtttaagttaaagaagaacagaaatagcagtgatacagaaaactcagcttctggggaaggagtaatagctgctggaacagaaagggagcgtgtgatttctggggatgatgctgtctgttgcatatgcttagcaaaatatgcaaacaatgacgagctgagggagcttccatgcaaccatttcttccacaaggagtgcgtggataagtggctgaaaatcaatgcattgtgtcctctatgcaagagtgaggtcgggataatcacgctggtatc

SEQ ID NO: 1320 - DNA, 401 bp, Eucalyptus grandis
atggaatgctatggttatgaggattaatgttgcacttttcgaagtctaggttaccccaattttgtcacttttgctgatttcccactattttcaggccttggttggcttaactggagattcatgggtgaatgtaagtcatgcgcatcacttgtattgtatgatatgtagcaactgcttgcttgagtcacatcacttgtcccataaaccttgtattgtagttctgtgttttcacggccagtaagattcaccttcttatgcatatctctattttcctgatgcatgagatctccctttctgttaagctctcttatttcgtcgatcagaatttgatcctttttcacacgaatacccttcaagctcatttccaattggttttccaaattctgtagttcttttacgct

SEQ ID NO: 1321 - DNA, 364 bp, Eucalyptus grandis
ctcgtgccgcggagtcttatatcagggagcttaacatgaacctacaagctgcagagtctgataaggaggatttgaagaagcagttggatgaactaaagaagcgatcatcggataaagaatgtatcccggtggatcaagatcgcaagatggcaaaacctacgggaagtaggtccactggggtggcaatcgatgtgaagataatgggttgggatgcagtggttcgagtagagagcggccggaaggatcatcctgcagcaaggttaatggtggctcttcaagaattgaacttggagttgcaacatgctagtgtttctgtggtgaacgagctcatgatccacaagccacagttaagatggggagtcag

SEQ ID NO: 1322 - DNA, 413 bp, Eucalyptus grandis
ttttttttttttttttcaaattcaagttgggaattttatgacagtgtagtggaagttctagacattgctcccttgatcctatggaagtagaattaaagctaatcatcaagctaaacatgaactacaactagtacaaaactttacagactcgtcaaaacccacaagtttcaccaccacgcagaagaagttgccatagctcgattcctccaccagagataaagagctccatccttctcttcgattctataattctcgttatattcccttaatagatttctgacagcatcagtaactgcagaactcaatgggaactgttgaaacccggccatcctaaaccttgacctccatttccccaaaagttcatgcctttcaaccctttccgtctcctcacaagctatcatggtggctatgtc

SEQ ID NO: 1323 - DNA, 382 bp, Eucalyptus grandis
caacaggatcctttgtgtactttctttgtatccacagaaagatggatgagagcaataacaaccctggggtggctgataatgccctgggcgacgacgggcagttcaaggagcaagaccggctgcttccgatagcgaatgttgggcggatcatgaagcagaacttgccgccgaatgccaagatctccaaggaggccaaggagacgatgcaggagtgcgtgtcggagttcatcagcttcgtcacaagcgaggcgtccgataagtgccggaaggagaggaggaagactgtgaatggagacgacatctgctgggcgatgcaagccctaggcttcgacgactatgcgagtgctttgaggaggtacctgcatagatatagggaaataga

SEQ ID NO: 1324 - DNA, 377 bp, Eucalyptus grandis
gcttacagggcctgcttggtgggttaattctttttcagctgatatcgttgtccttacggttatcctcttctctccaactcctctggttctctgttccgccaaagaaatggggagacattcttgctgtgtgaagcagaagctgagaaaagggctatggtcgcccgaggaagacgagaagctcttcaactacatcacccgattcggcgtcggctgctggagctctgtaccgaagctcgccggtaagacatgatgacagacgggaaaggagaagctcattcacagttgttttctggggaataagtttctgttcttggagagaatttgattcgaaaaccatgtgaatgatcgaattctctcgtcgaatgcacgactccaga

SEQ ID NO: 1325 - DNA, 305 bp, Eucalyptus grandis
tgattccgagccgagccgccgcggcgtccgacgacgttccggaagtcgccggatcggcaccgaaggggcacgtacaacagcagcagcagccgcaacaggtcggcgccggcgagcccaagtacaggggcgtgcggaggcggcggtggggcaagtacaccgccgagatcagcgaccccgtcaagaaggcccgcgtctggctcggcaccttcgcctccgccgaggaggccgcccgcgcctacgacctcgccgccgtccggttccgcggctccaaggccaagaccaacttccccgcctccctctacgac

SEQ ID NO: 1326 - DNA, 288 bp, Eucalyptus grandis
gtgctttggagtcagcttcctcctctgcttccgaatattgacttctcgagaatacagctgacttctcatattcagagtccgatcgtcggagctcggcgcgttcgatagggaattggctggcttcaggttcctggggtctgtgctttggatgttaagctcgtagagactgaatcgacgatggatggttcgcaaggaaaatcgaatgctccggctccgttcctggtcaagacctatgagatggtcgatgatcctcagacggacttcctggtgtcctggagcgagagcgga

SEQ ID NO: 1327 - DNA, 190 bp, Eucalyptus grandis
gagagagatggggctccggaggatgacgggtcagtcgtcgtcccggtcgggcgacccgggcgcctccaccagcggcggcggcggggcggagtcgccgcggcggttcgcgccggcggctcagccggagataatgagggccgccgagaaggacgaccagtacgcctccttcctctacgacgcctgccgcgac

SEQ ID NO: 1328 - DNA, 259 bp, Eucalyptus grandis
gtggtttcggctcgccgggcccgttcgaggaggagcttccgcggcggggtggtggccatggccgcgcccgggtcggtccggaagtcggaggaggagtggcaggcggtcctgtcgccggagcagttccgtatcctgaggcagaaggggaccgaatatccaggcacgggtgaatacacaagttttctgaagagggggtgtacaattgtgcaggatgtgggactcctctttaccggtctacaactaaatttaactccgctgc

SEQ ID NO: 1329 - DNA, 381 bp, Eucalyptus grandis
gacaggggtttctgtgttggattgtgtgtggagatttggagggacgagtcatggcggatcaggccttggagggaagccaaccggttgatctgtccaagcatccttcaggaatcgttcccactcttcagaacatagtctcaacagtgaatttggactgcaaattggatcttaaggccattgctttgcaagctagaaatgctgagtataatcccaagcgttttgctgctgtaattatgagaataagggagccaaagacaacggcattgatatttgcttcagggaaaatggtttgtactggagccaagagtgaacaacaatcaaagttagcagcgcggaagtatgctcgaatcattcagaaacttggattcccggctaaattta

SEQ ID NO: 1330 - DNA, 347 bp, Eucalyptus grandis
ccgctctcctccgccttccgccaccgcaaatccctccgatcgatcggcacgacacgacccgaaaacgaccccggaaagcctccgctccccgcggcggaagatggcggcgagcgacgcgaagatcgggaggaggttagagggcaaggtcgccatcgtcaccgcctccacgcagggcatcggcctcgccatcgccgagcgcctcggcctcgaaggcgccgccgtcgtcatctcctctcgcaagcagaaaaatgtggatgaggctgctgaaaagctcagggcaaagggtatagaggttttgggcttggtttgccatgtttccaatgcacagcagaaggaaatcccttgtt

SEQ ID NO: 1331 - DNA, 337 bp, Eucalyptus grandis
gataagtccaaggggaaggccaagatcagcgcctcctccgcggccgagcaggagcaccggaagcgcgtgctccgcgagctcaactccctcatcgccgggccctcctccgccgccgccgccgcccccgacgacgccgtcgacgaggaggtcaccgacaccgagtggttcttcctcgtctccatgacgcagtccttcggcaacgacggcagcttgcccggccaggccctgtacgggtcgaccccgctttgggtgtcgggcggggaccgcctcgccgactgcggctgcgagagggcgaagcaggcgcggattttcgggctcaacaccatggtctgcgtcc

SEQ ID NO: 1332 - DNA, 325 bp, Eucalyptus grandis
  misc_feature (210)..(210): n is a, c, g, or t
gccaatgggagggaggagcctctgaaccacgtcgaggcggagaggcagaggagggagaagcttaatcagaggttttacgccctcagggccgtggttccaaatgtatcaaagatggataaggcttcactgctccaagatgcggagtcttatatcagggagcttaacatgaacctacaagctgcagagtctgataaggaggatttgaagaancagttggatgaactaaagaagcgatcatcggataaagaatgtatcccggtggatcaagatcgcaagatggcaaaacctacgggaagtaggtccactggggtggcaatcgatgtga

SEQ ID NO: 1333 - DNA, 362 bp, Eucalyptus grandis
cagcatcattataatgtccatgaagagaatcgactgcggcatcacgatttacattagtttcgcctcccttttcgcttgctgcacctgtgcaagcctttgacttcgtagagtcatgtgcgttccttgggcacccttctttgtagctggtggagcagggggggctacaacggatgcttgggagagtgatatgcgcgtctcatcagatgagaaaccgggaatacgaatgttgtggttgcgttcaaggtgtagttgcaggtcgcgcacttccaaagtgtccccaccgcgatgcttagccaagcgacacgcaaagttggtgacggaatcgatgaattcatcagcaatagaaagcaggagatcttcca

SEQ ID NO: 1334 - DNA, 216 bp, Eucalyptus grandis
gtttacgcggttgttgatggattacttaaatgaatttgcttatgatgcacgggttgctggcctttattacagtgtgcatgacaccaacacaggttttcaggtcactgtggttggttatagtcacaagctaaggatattgctggaaaaagtcatcgagaaaattgcaacctttgaagtgagacctgagagatttgttgtgatcaaggaagtggtgac

SEQ ID NO: 1335 - DNA, 326 bp, Eucalyptus grandis
  misc_feature (3)..(3): n is a, c, g, or t
gcngaatcagagcaactgggaggcggataagatgctcgacgtttacatgtatgactacttgatgaagaagaagctgcacaacacggcgaagtcattcatgactgaagggaaggtgtcgccggatcccgttgcaattgatgctcctgggggatttctttttgagtggtggtcagtcttttgggatatatttattgcaaggactaacgagaaacattctgaagctgctgcagcatatattgaggcacaacaaggtaaagcaagagagcagcagcagcagcagcagcagcagcagcagcaacagcaactgcagatgcaacaattgcatc

SEQ ID NO: 1336 - DNA, 382 bp, Eucalyptus grandis
aaacaatcgataatccttccttccatctttcctcctcctcccccccttgaaatcccgaatccaccaccacaaccccccaccgccacctgctcgttggtaatctctcttttgcttctggagagggaagtgaagtgatctcggatcagctgactttggagaatgatcctaaagctggtatttctacattgagatcatctttaagagcgctgtggttctctgatggcatctcatccatcaaatcattcgtgtgggcgccctcatcaaggtgcgtttgctgatgctttatacaaagagctgtggcatgcctgtgctgggcctcttgtcacccttcctcgagagggagagcgtgtctattattttccacaaggtcacatggagcagc

SEQ ID NO: 1337 - DNA, 322 bp, Eucalyptus grandis
ctctctctctctaggtcgctctcgattctcgctggtctcgccttcctcggactatcttcgcgatcgcttttggaggatcgttcggggaaattggaccgaagtttcgatttttagcaggcgagatcagctgaatcgggagatcagaataatggagtctcacgatgagacaggatgccaggccccaaaaggcccaatcctctgcattaacaactgtggcttcttcggaagtgctgccaccgccaatatgtgctcaaagtgccacaaggacgtgatattgaaacaagaacaggcacaagcagctgcctcctcgattgagagcatt

SEQ ID NO: 1338 - DNA, 536 bp, Eucalyptus grandis
gttcgacgagttcacagcgagctgacaaatcattgatcatggagcatgagtttagttcggctaaaatcaaagctcttcttgagattctacagtcgcaatgcagaggagaaagtgcaaatgcagagcttcatggtcccatgggctgtgacgatgagtctctttttgaaaatacaggcaccggggattctacatacagagttaaagctgttaagcacacaactgtttattcaagttctcctcctgaaggaccaattaaagcaattgtcttttctcagtggacgagtatgttaaacttggttgaacaaaatctgatccattttggcataaattatagacggcttgatggaacaatgaccctttctgcaagagacaaagctgtgaaagattttaacaccgatcctgagatagtcgttatgctaatgtcattaaaagcaggaaaccttggtctaaacatggttgctgcttgtcatgttattcttttggatctttggtggaatccaaccactgaagatcaagctatcgatcgagctcataga

SEQ ID NO: 1339 - DNA, 438 bp, Eucalyptus grandis
cgacttcaaggagtaccgacttcgctgcgagctgcgcggccacgaggacgatgtccggggcgtatgcgtgtgcggggacggcagcatcgggacctcgtcgcgggatcggacggtgaggctgtgggctccgagcgccggcgagaggcgcaagtacgaggtggcgagggtgctgttagggcacaagagcttcgtgggtcccctggcgtgggttccgcccagcgaggagcttccggagggcgggatcgtgtccggcgggatggacactctcgtgatggcttgggatttgaggaatggagaggcgcagacgttgaagggccatcagttgcaggtcaccggcatcgtgttggacggcggcgacatttgtttctgcctcttgttgattgtaccttaataagatggaagaatggccagcttacggagcactgggaggctcattaa

SEQ ID NO: 1340 - DNA, 533 bp, Eucalyptus grandis
ctttggaggccctcagctcccccaccgctccctccgccccgttccaattcatgaaggactcctcccccgccgccgccgccgccgcctcctcctcctcctccgcctacgacctccccctcgccgagccctgggccaagcgcaagcgctccaagcgcccccacaacccgccctccgaggacgagtacctcgccctctgcctcatcatgctcgcccgcggcggcgccggccggaccctccccccgccgcctccccccgcggtctcttccgaggcggccaaggtggcctacaggtgccccgtctgcgacaagggcttcccctcctaccaggccctgggcggccacaaggccagccaccgcaagcacgcctcctccgcctcggccgccgccgggggtgacgaccagccgaccacctcgagcacctccgcggcgacgacctcctccggcgtctccgggaaggtccacgagtgctcgatctgccacaagagcttcccaccggccaggcgctcggcgggcacaagcggtgccactacgagg

SEQ ID NO: 1341 - DNA, 363 bp, Eucalyptus grandis
gaagcatttgggaagtggacatggaaggaaagatcccgactttggtactgtttctctgcatcttctcggctgccgtcgcggccgagtacgtgcggccccagcctcgcgagaccctcgatttcccgtgggaccgcaagccctcctcttatccccagcaggttcacatttctttagctggagatggacatatgcgcatttcatgggtcactgatggtaaatcttccccttcatacgtggaatacggaacatcgcccggtcgatatgactctacagctcaaggagagagcacttcttatagttatctattttatagctctggaaagatacaccacacggtgatcgggccattggagagcaacactg

SEQ ID NO: 1342 - DNA, 316 bp, Eucalyptus grandis
cctggcctctgccttagctctcctcctcgtcctcgcccttatcaagctattcagacccaaaaccaaccacctgaacctcccgccggggagatttggatggccaatcattggcgagagcctggagttcctccgttcccagcttgaagggagcccggagaagttcatcaaggaccggatgaccaagtacaactcccctgtgttcaagacctcggtgctcggggagccgatggtcatcctgtgtgggccggcggggaacaagttcctgttctcaaacgagggcaagaaggtggtgctgtggtggccgagctcggtccat

SEQ ID NO: 1343 - DNA, 322 bp, Eucalyptus grandis
aggtgttccgatcttcatagaagatgatgatgttgagctgttgtggcctggcagcttccgtcaggcggcacaagcacacgctcctcaaccgagttttgttctaactggaggttctaacataagcttcgtcggggtgaatccaccatctgatgcaggcaattcagctcctgacttgacactgaaactttaaaagaggttaatcttcagttaagtctcatgtttgcttaacccaacattgcacttctgctttcttttggtatattcccaaatgttctttccagttcctttcctgtaagtgctcactccagtatgaagtctataa

SEQ ID NO: 1344 - DNA, 323 bp, Eucalyptus grandis
ctggaccgccacctgaagaccctgaccggccacgtcgccgccgtctcctgcgtcaagttctccaacgacggcaccctcctggcctccgcctccctcgacaaaaccctaatcatctggtcctccaccgccctctccctcctccaccgcctcgtcggccactccgagggcgtctccgacctcgcctggtcctccgactcccactacatctgctccgcctccgacgaccggaccctccgcatctggtcctcccgctcccccttcgactgcctcaagaccctgcgcggccacaccgacttcgtcttctgcgtcaacttcaacccgca

SEQ ID NO: 1345 - DNA, 235 bp, Eucalyptus grandis
cctccgccccgttccaattcatgaaggactgggtaccccgccgccgacgccgccgcctcctcctcctactacgaatacaacctccccctcgccgagccctgggccaagcgcaagcgctccaagcgcccccacaacccgccctccgaggacgagtacctcgccctctgcctcatcatgctcgcccgcggcggcgccggccggaccctccccccgccgcctccccccgcggtctctt

SEQ ID NO: 1346 - DNA, 350 bp, Eucalyptus grandis
gtttggaggaagttcaagctatgggaaggatgctcaaagcccgcaggacatgcatgattcacggccgacaaaacgaccacgtaatgttggggagccttatcgtgacccaggacaggctgagccgatggaggaacatggaatgggatcagcaagtgatcctatggtgcgggcaggcagatcggacggaggtcataatccaattatgtcggccaccgctcccgcaaatgtgtctacggctgggagaggtcgggtagatgataaaaacaatcgcaaattgtcgtgtaaagagtgtcgtaggctaaaactcaagtgcgaccgcgttttcccttgccagtcatgcgtcaagagag

SEQ ID NO: 1347 - DNA, 197 bp, Eucalyptus grandis
cggactcggactggccgagtcaacccacgccccccgcgagtcccgaccccccggcgccatgacgcggcgatgctcccactgctgcaacaagggccacaactccaggacctgccccgtccgcggcggcggcggggacggcgggggcgcggcggccgccccctcctcctcctccccctccacctcctcctctggcgccg

SEQ ID NO: 1348 - DNA, 315 bp, Eucalyptus grandis
cgctggtctcgcttcctcggactatcttcgcgatcgcttttggaggatcgttcggggaaattggaccgaagtttcgatttttagcaggcgagatcagctgaatcgggtgtccttttgcaggtgatcagaataatggagtctcacgatgagacaggatgccaggccccaaaaggcccaatcctctgcattaacaactgtggcttcttcggaagtgctgccaccgccaatatgtgctcaaagtgccacaaggacgtgatattgaaacaagaacaggcacaagcagctgcctcctcgattgagagcattgtcaacaga

SEQ ID NO: 1349 - DNA, 329 bp, Eucalyptus grandis
gagagagatggggctccggaggatgagggtcagtcgtcgtcccggtcgggcgacccgggcgcctccaccagcggcggcggcggggcggagtcgccgcggcggttcgcgccggcggctcagccggagataatgagggccgccgagaaggacgaccagtacgcctccttcctctacgacgcctgccgcgacgccatccgccacctcttcggcaccagagtcgccgtggcgtatcaaagcgagacgcagcttctcgggcaaatgctgtactatgtgctgacgactggttcggggcagcagacgttgggggaagagtactgcgacatcactca

SEQ ID NO: 1350 - DNA, 313 bp, Eucalyptus grandis
tctaggtcgctctcgattctcgtggtctcgccttcctcggactatcttcgcgatcgcttttggaggatcgttcggggaaattggaccgaagtttcgatttttagcaggcgagatcagctgaatcggaataatggagtctcacgatgagacaggatgccaggccccaaaaggcccaatcctctgcattaacaactgtggcttcttcggaagtgctgccactgccaatatgtgctcaaagtgccacaaggacatgatattgaaacaagaacaggcacaagcagctgcctcctcgattgagagcattgtcaacaga

SEQ ID NO: 1351 - DNA, 305 bp, Eucalyptus grandis
  misc_feature (194)..(194): n is a, c, g, or t
  misc_feature (197)..(197): n is a, c, g, or t
  misc_feature (200)..(200): n is a, c, g, or t
ccccgcccacttatctgctatcctcgctacttcgctctattagtacctccacaatcccatgcgcaaacgccaacgcaccctcgacatgcacgccggcgcaccaggtcccaacgatgccattgacgcgaacagcgtcggcgacaacgcgttcatcgcggatcacgacgcaattgactcggccggcgacgacgacnacnacnaagacaagcccaagaccggccagaagcaaggccgccgcaaaataaagatcgagtttatacaggacaaatcgagacgccatatcaccttctccaaaaggaaagctg

SEQ ID NO: 1352 - DNA, 517 bp, Eucalyptus grandis
  misc_feature (348)..(348): n is a, c, g, or t
gtccctccctagggtttcctcctcgtcgaccgccccttctccgagccctagcctcgcgcggcaaaggcccctccctccgtccctccctccgccgccatgatgcagcagccggtccccggagccgtccccgaccagcagcagcagtaccagcagcagcagcagcagcagtggatgatgatgcagcaggccgcccagcccgtgcccccgccggtgggctggaccccgcagccggtcccgccgcccatggcggcccagtcgatggccggcggcgcggcggccgagatcaagtcgctctggatcggcgacctgcagcctcacatggacgagacctatctcctcaactgcttngcccactccggggaggttctctcagctaaggtgattagaaataagcagactgctctgcccgagggttacggtttcattgaatttatgacccgtgcagcagcagagaggattttgcagacgtacaatggcacattgatgccaaattctgaccagaatttccgactgaact

SEQ ID NO: 1353 - DNA, 472 bp, Eucalyptus grandis
tttttttttttttcagctaaattggagcagctctctttaatacttactgaactagtaatcatggtgaaagaaacttagacagaaagtgaggacattacatcatactcctgaagagcatcaaaggcccagctaacagaaaaaggccgatacggcaacatccaaacaaattaaaagccaaattgtgaccccaacgctaccatccatatacaatgccataactaaatcattcaccttccgacatctactctctttctacttgaatggtgacgtgacttatcttgtactctcttctaatgtagtccacaaccttgtccaggaccatatcggcattggcgtcacgctttattttgacatggcaggctaatagtacctttccaaccgttatagcccagatgtgcaattcatggactgcaatcacttcatcgatcttgcaaagtccactctcgagcctagtggcatcaatctctctagg

SEQ ID NO: 1354 - DNA, 472 bp, Eucalyptus grandis; identical to SEQ ID NO: 249

SEQ ID NO: 1355 - DNA, 503 bp, Eucalyptus grandis
cacgcatccaacttcatcaggaaggagctgagggccatcatcaagcagaggaagctggacttggcagaaggcagggcgtcggcgactcaggacatattgtcgcacatgctgttggccacggacgaagatgggaagcacatgaacgagatggacattgctgacaagatcttgggcttgttgatcgggggccacgacactgccagtgccgcctgtaccttcatcgtcaagtaccttgccgatcttccccaagtctacgagggagtctacaaggagcaaatggagatcgccaagtcaaaagccccaggagagttgttgaactgggatgacatccagaagatgagatactcatggaatgtggcgtgtgaggtgctgcgattggcgcctccgctccagggagcattcagagaagccctcaatgacttcatcttcaatggtttctccattcctaaaggctggaagatctattggagtacccactcgactcacaggagcccagagtactt

SEQ ID NO: 1356 - DNA, 360 bp, Eucalyptus grandis
atcttcttctcccccaaaaccccatcggacccaaaaaccctaacgaagatgaatagggagaggcttatgaagatggcgggttctgtccgcactggtggaaagggtaccatgagaagaaagaagaaggctgttcataagaccaccacgacagatgataaaaggcttcaaagcaccctgaagaggattggggtgaatgccatccccgcaattgaagaagtcaacatttttaaggatgatgtagttatccagtttttgaatcccaaagttcaagcgtctattgctgcaaatacctgggtagttagtggttctcctcagaccaagaagctacaggatatcctccctggcatcatcaaccaatta

SEQ ID NO: 1357 - DNA, 377 bp, Eucalyptus grandis
aaaacaacctccctcagctcctcttcaccactggtttttgagatgatctgtgtgctcggcgccgttgattattatgtcttattctgacttgctgaacctgctgtttgccgtgggcgtttggtgcaccgcgtatattgcggctgccgttctcgagtcgctccgggtcttccatactctctgttcgttttgatttcgatagctgttttcgaaggctaagatgggctacgcacagctggtcatcggccctgccggcagtggcaagtcgacttattgctcgagtttgtatcaacattgtgaagctattgggcggacaatacacattgttaacctagatcctgcagcaaagaactttgactatcctgtggccatggatatca

SEQ ID NO: 1358 - DNA, 360 bp, Eucalyptus grandis
ctctgacgatggatataactggagaaaatatggacagaagcatgttaagggctgtgaatttccacgcagctattacaaatgtacctatcctaattgtgaggtgaaaaagcttttcgaacgtgctcctgatggacatattacagagattatctacaaaggaactcatgatcaccctaaaccacaaccaagccgccgctttactggaggagcgaccatgccaatccaagaagaaagatctgataggttttcatttatacctgcagtggagagcacatcgaccgtatatggcgagacatcttataatgttgagactgatggtactcctgaactatctcctgttgctgagaatgacgaaactat

SEQ ID NO: 1359 - DNA, 347 bp, Eucalyptus grandis
gttccaccacgctcgtcccgctcccgcatttctgaaatcgcgatcgccgtcttcaacctcgggaaaaaccctagcggatcccctccggtcgccaattcatctcctgatccccgccgtcgcccatgccgccgtcgatcccgccgcgccccctctcgccgtcgatctccagctgatcgcgcctccgattttgctccccgccccggcgcgatggtggtctgcaaatgccgcaaggctacgaagttatactgcttcgtgcacaaggtccctgtgtgtggagaatgcatatgctttacggagcaccaaatatgcgtggttcgtacttactcagaatgggttatagatggcga

SEQ ID NO: 1360 - DNA, 326 bp, Eucalyptus grandis
  misc_feature (40)..(40): n is a, c, g, or t
  misc_feature (55)..(55): n is a, c, g, or t
  misc_feature (118)..(118): n is a, c, g, or t
ctcctcctccccctccacctcctcctctggcgccgcggcngcggcggcggcctcngcctccggcggcggggtgaagctgttcggggttaggttaacggacgggtcgatcatgaagaanagcgccagcgtggggtgcctgtccgccgcccactaccactcctcgtcctccgccgcggcatccccgaaccccggctcgtccccgatcgacgggagcgacggctacctgtccgacgatcccgcgcccggctcccgctcgtccaatcggcgcgtcgagaggaagaaaggtatcgaggattttgattgacgcgcggctccctgattccctg

SEQ ID NO: 1361 - DNA, 526 bp, Eucalyptus grandis
atcccactccccatccgctccgcctgaatcctctcctgggaaaattagggtttctgcaagctccggattttcgctcccttttgggggtcctcgatttgatgataagccatggatgcctggggtcgtgctagtgtgctgcgcgcgctcctgtggctcgccttgcttggggttggccgcacggcgtcggcgagcgtcgtcctgatcggcagcaacgtcaccctctccttcgccgccgtcgaggctgaattcgctccgccgattaagggttctggggtttgcggcgtgctgtatcttgcggacccgatcgatgcgtgctctcaattggtgaatgaggccaaccggttgccgaatgctagctcccctttcgccctaattgttaggggaggaggatgtagtttcgaagagaaagttaggagagctcaaaaggctggattcaaagcggctattgtctatgacaacgaagctgatggcaacttggtgccaatggctggacattcagctgggataaagatccatgctgtgttcg

SEQ ID NO: 1362 - DNA, 307 bp, Eucalyptus grandis
gacccgcatacccgctgccaatctggaggacctatttgacaaccataacatggctcgaatacgggacgtatgggccccgaatcttgagatagagatgcagaacatccgcgaggccatcgagaaatactcgtatgtttcaatggacaccgagttcctggagtggtggcgcggcccataggtaacttcaaaacgtcctcggactaccactaccagacgatgcgctgtaacgtcgaccttctcaagatcatccaagtcgggatcacgctggcagacgaggaggggttgttcccgcaggactgctctacgt

SEQ ID NO: 1363 - DNA, 353 bp, Eucalyptus grandis
  misc_feature (68)..(68): n is a, c, g, or t
cttgaaggtgacttcaacaaacacgatgaggataactggatccaagaagagtttgagaaccatgtggntaaacaacgtgaaggaaagaggccgcttttgactggagatctcctagtgaagctcgaaagaggtgttgggaagctgggaagtttcatgtttactgacaattccagctggaataggagtaaaagtttcaggatagggcttaaggtggcctcaggttattgtgggaacacacgaatccgagaagcaaaaacataagccttcactgtgagggagcatagaggagaatcatataagaaacattatccacctgcacctgacgattaaatctggaggttggagaagatcgc

SEQ ID NO: 1364 - DNA, 324 bp, Eucalyptus grandis
cctcgcccggcaaaaccgattcgaggtcgagagtcgagtaaagatgaatgtggagaagcttatgaagatggcgggttcagtccgcactggtggaaagggtaccatgagaagaaagaagaaggctgtgcacaagacaactaccacggatgacaaaaggctccaaagcactctcaaaagaattggggttaatgctattcctgcaattgaggaagtcaacattttcaaggatgatgttgtcatccaatttgtaaatcccaaagttcaagcctctattgcagccaatacatgggttgtcagtggtgctcctcagaccaagaaattgca

SEQ ID NO: 1365 - DNA, 306 bp, Eucalyptus grandis
gacaaattgatgaaacatgaatatggatgggtgtttaacactccggttgatgtaaagggcctcggtttgcatgattactatagcatcataaagcatccaatggacttgggcagtgtgaagacaaggctgaaccggaactggtataagtcaccgaaagaatttgcagaggatgtcagacttacgttccgtaatgccatgacatataaccctgaagggcaagatgttcatgtcatggctgagattctgtacaagatatttgaggatagatgggccattatagagtcagattataatcgtgaaatgcgg

SEQ ID NO: 1366 - DNA, 345 bp, Eucalyptus grandis; identical to SEQ ID NO: 194

SEQ ID NO: 1367 - DNA, 292 bp, Eucalyptus grandis
cgaaggtctcacatttatgaaactcaaggtctgaaggatgcatttattatatgtctcaatgccgtagagtccattgatgcaactaaaaaggggagccttgctaggttcataaatcattcatgccagccaaattgtgagacaaggaaatggaatgtattgggggagataagagttggcatatttgccaagcatgacattcctgctggatctgaattgtcatatgattataacttcgagtggtatggtggagccaaggtccgttgtctctgtggtgcacctagctgtctggttt

SEQ ID NO: 1368 - DNA, 278 bp, Eucalyptus grandis
ctgcaacgacctgacggcgttgcggcggttcctgccgtcgaaccaccaccaggacgaggaggacgaggaggacgggcgggcgcccggggaggacggcgtgctgggctgcgacgagttccggatgtacgagttcaaggtgaggaagtgcgcgcgcgggaggtcgcacgactggacagagtgcccgtacgcgcaccccggcgagaaggcgcgacgcagggacccgcgccggttcttctactccggcactgcatgtcctgatttccgcaaaggcgcgtgca

SEQ ID NO: 1369 - DNA, 328 bp, Eucalyptus grandis
ttcacttcgtcgcctgcctcgtcgtcctccctgtcctcctcgcgaatctccatcggcgagaactctgataaagcatccctcggctatctgtcggatggcctgctgggtagatcccaagagaagaagaaaggagttccatggacagaggaggaacacagaaccttcttggtggggcttgagaagcttgggaagggtgattggagaggcatctctaggagctatgtgaccacaagaacaccggcccaggttgcaagtcatgctcagaaatatttcctccggcaagtgagcttcaacaagaaaaagcggcgctcgagcctctttgacatgg

SEQ ID NO: 1370 - DNA, 96 bp, Eucalyptus grandis
  misc_feature (67)..(67): n is a, c, g, or t
tgaattcggcggggagttaatgaatccaagaagcaactggctaattgtatataatgatgatgagggngacatgatgcttgttggggatgacccgtg

SEQ ID NO: 1371 - DNA, 320 bp, Eucalyptus grandis
agagagagaagaacccttcttcacaaacctctctctctctctctctctctcttcccctgtgtctgtcgattctcgctggtctcgcgttcctcggattgtttcgatcgcgtacgctgaatcgcgccgggaattcggccgtggtttcgattttgtcgagcgagatcagcagaatcaggagatcaggacaatggagtctcacaatgagacaggatgccagcctccaaaaggcccaatcctctgcatcaacaactgtggcttctttggaagtgctgccactgccaatatgtgctcgaagtgccacaaggatgtgatgctgaagc

SEQ ID NO: 1372 - DNA, 343 bp, Eucalyptus grandis
cggccgcctgcagctttcccctccgtgtcgacacgacgacgactccgccgccgctcccccctcgcgtcgtctctccttctctcgccctgtatatatctctcgtcccccgacaaaaaaaggagaaatctgaagagaggggactgaaattaggttattgagaaggattcttcccgtgaccaatcttttggagaaagatggcttctcaatttaatttcaaaggcataaccgatgcatcgcaagctgaaggagtagctgggaaatcacacggaaatcactctttaactcggcagccatcaatatatgctttgacttttgatgagtttcaaaacacatggggtgggct

SEQ ID NO: 1373 - DNA, 310 bp, Eucalyptus grandis
ctccccctcgccgagccctgggccaagcgcaagcgctccaagcgcccccacaacccgccctccgaggacgagtacctcgccctctgcctcatcatgctcgcccgcggcggcgccggccggaccctccccccgccgcctccccccgcggtctcttccgaggcggccaaggtggcctacaggtgccccgtctgcgacaagggcttcccctcctaccaggccctgggcggccacaaggccagccaccgcaagcacgcctcctccgccgcggccgccgccgggggtgacgaccagccgaccacctcgagcacct

SEQ ID NO: 1374 - DNA, 306 bp, Eucalyptus grandis
  misc_feature (237)..(237): n is a, c, g, or t
agcaagcaaaagaagaaaccagaaaaatcagacaccccgatttcacattctctactacagaattccggagatggtgaagagagacagagaggacacggaggtcgaagccctggccagggccaattgcttgatgctcctctcccgtgttggcgagagcaccgactcggcgtcgccggaccgcaaatcgcggcctacagagcgaatgttcgcctgcaacacttgcaaccgcgagttctnctcgttccaggcgctcggagggcacaaagccagccacaagaagcagaagctgatctccggtgacctctt

SEQ ID NO: 1375 - DNA, 273 bp, Eucalyptus grandis
cctcctcctcctgctgcggctacgacctgcccctcgccgagccctgggccaagcgcaagcgcttcaagcgcccccacaacccgccctccgaggacgagtacctcgccctctggctgatcatgctcgcccgcggcggcgccggccggaccctacccccgccgcctccccccgtggtctcttccgaggcggtcaatgtggcctacaggtgccccgactgcgacaagggcttcccctcctaccaggccctgggcggccacaaggccagccaccgta

SEQ ID NO: 1376 - DNA, 319 bp, Eucalyptus grandis
gacaaatgagaaccctaggacgccttcagtcgacaaggagagcactactccaaggacgtcgaaatcagaagaggagcagagcgacacgagcaactcgcaagagaaggtgctcaagaaacctgacaagatacttccttgccctcgatgtaatagcatggacaccaaattctgttactacaacaactataatgtgaaccagccccgacacttctgcaagaactgccagagatactggacagctggtggaaccatgaggaatgttcctgtgggtgctggccgccgcaagaacaagaactcggcatctcattaccgtcatcta

SEQ ID NO: 1377 - DNA, 339 bp, Eucalyptus grandis
tctctctcttcgtttctcccgtttctctctctctacctctcgccaagaaaccgccaggaaaggaaggaaggtaaaaagaaaagaaaaggaagccatggctccgagagaaaagcccagcgtcgccgccatcccaaaccctaacggcgctaaggaaatccgtttccggggcgtccggaagaggccctggggccgctacgccgccgagatccgggaccccggcaagaagacccgggtgtggctcggcaccttcgacacagccgaggaggccgcccgcgcctacgacaccgccgcccgcgagttccgcggcgccaaggccaagaccaacttccccacctccgc

SEQ ID NO: 1378 - DNA, 343 bp, Eucalyptus grandis
ctttgacgcgcattaaattcccgcgactccgaaatatctcacctccctctcccgcagaatccctagattccttccttagctcctcctctctccctctctctctctctctctctatagaaaattcctcatctttggtggcggcgagaggcggttgcgagggatttccggtcgcgggtgtatgtgcgtggggttggggttggggtgggggagatgaagattcagtgcaacgtgtgcgaggcggcggaggcgagcgtcctctgctgcgccgacgaggcggcgctctgctgggcctgcgacgagaaggtgcacgccgccaacaagctcgccagcaagcaccagcgcg

SEQ ID NO: 1379 - DNA, 368 bp, Eucalyptus grandis
ctcgattctcgctggtctcgccttcctcggactatcttcgcgatcgcttttggaggatcgttcggggaaattggaccgaagtttcgatttttagcaggcgagatcagctgaatcgggagatcagaataatggagtctcacgatgagacaggatgccaggccccaaaaggcccaatcctctgcattaacaactgtggcttcttcggaagtgctgccaccgccaatatgtgctcaaagtgccacaaggacgtgatattgaaacaagaacaggcacaagcagctgcctcctcgattgagagcattgtcaacagaagttccaacgaaaatggtaaaggacctgtggcaactgaaaattggatttgcaagctg

SEQ ID NO: 1380 - DNA, 362 bp, Eucalyptus grandis
gaggctcagtacttcgtgtagccatggggcatgaaagtgaagcatttgaagagtttgttgatgcgcacaaaacttgcttgaatgatctcatgttcttccctactcgtaatgccttggactctcaagtgttgctgcaaatgcagaaaagcttgctgccttgcagaacgaatatcattttgctaaagcaaggattgatgaagatcatgagaaggcgcagcgactggagaagaaggtcaaaactctcacattcggctatcagatgcgggagaagactcttcgagaccaaattgagtcaaccttcaagcagctggacactgcagggacagaactcgagtgtttcccagctctgcagaagcaagagc

SEQ ID NO: 1381 - DNA, 459 bp, Eucalyptus grandis
tgctcgcaaagtttgtttctttgctcacaagcccgaagaattaaggcctgtctatgcttcgacgggatcagctatgccttccccaaaatcctactcatcaagtgggctggacatgtccacattgagtcctctctcaatcagttctccgtcagcatcgttgcctgttacttcaacagcacccatgtctcctcttgcagcctcgtcatctccgatgtctgtgaacatgtggcagagcaaggctaacaagctctccccgccaatgctgcagctctcaggtagtaggctgaagactgctttgagtgctagggacttggacctggagatggaattgcgtggtctagagagtcagatggccactcaacagcatcagttgatggaagagatatctcgtctctcctcaccatcatcctgctttagtagtaggattggggaagtgaaacccactaacctcgatgacgt

SEQ ID NO: 1382 - DNA, 319 bp, Eucalyptus grandis
aaaaaaagaagcataacttcaacgagcgaatctccctctgtctctggttcatctttggttcttcaggctcagaaccatggctcagactgttgttctcaaggttaaaatgtcatgtcaaggctgcgctggagctgtcagaagggtcctggaaaaaacggaaggtgtggaaacatttgacatcgatctgaaggaacagaaggtgacagtcaagggcaatctgcagcccgatgctgtcctgcaaaccgtctcaaagtccggaaaacaaactgctttctgggaagcggaagccccagcccaacccgaagtgaagcccaccgaa

SEQ ID NO: 1383 - DNA, 408 bp, Eucalyptus grandis
cttgctttcctcttgttggtccaacgcagagagaagagagagagagagaggtggaagaagatcaatctcgtatctgaccggcgaccggtggtgctcttcatcttctccacctcatcctctctctctagagaaccgaaagccggcgtctttcgtcgtctccggttcggcatgaacgggaaggccaacgtctccaaggagctcaatgcgcaccacagaaagattctcgaagggcttctcaaattgcctgagaacagggagtgtgctgattgtaaggccaaaggtccaagatgggctagtgtcaatttagggatatttatatgcatgcaatgttcaggaatccatagaagtcttggggtacacatatcgaaggtccgatcagctactttggacacatggcttccagagcag

SEQ ID NO: 1384 - DNA, 315 bp, Eucalyptus grandis
gcaaaattgggccccttcaaaattactgggaggtcttctcctaaatgcctagaaggatccgatggaagaaatttgcagctacaattcaggaccaggttgtcgctcccgctctttactggaggcaaagtggaaggcgagcaaggtgctgcaatccatgtcgtcttaatgaatgcagatacaggctgtgctgtcacatcaggtccagagtcctctgtgaagcttgatgttgttgtccttgaaggggatttcaacaatgaagatgatgacacttggactcaggaagaatttgacagtcatgtagtgaaagaacgtgaa

SEQ ID NO: 1385 - DNA, 375 bp, Eucalyptus grandis
  misc_feature (333)..(333): n is a, c, g, or t
gttctcgagaacccagctccatcccagttcgacccatctgagaacaagtcaacccagatcgtcaaaatcgaatcttgactcgagggagaagcggagaatgacgaagcgcagcgcagccaaggccgcggcggtgcacgagggcgagggagcgaggagcgagctgaagttcagaggggtgcggaagaggaagtggggcaggtgggtctccgagatccgcctgcccaacagccgggagaggatctggctcggctcctacgacacccccgagaaggcggcccgcgccttcgacgccgccgccttctgcctcggccgccccgccgcgaagctcaactnccccggcagccccccggagatctccggcgcggcgtccctctc

SEQ ID NO: 1386 - DNA, 332 bp, Eucalyptus grandis
ccgaataccaccaccgcgaaaatgatgatcggcgagtcccgccaccaccccctccaccccacgacggtttgcatccctcctccgctgtggccgtccctcgacgatcccgccgacgagatctcccccgccttcgacgcggaccacctcgccgccgtcgccgccgcttctagtccgtacgctctgcaggacatcatcgcggcgctgcgccgccaccagtccgacccggactccgacggccccgactcgccggtggacctctacacgtccgatcacttccgcatgtacgagttcaaggtccggcggtgcgcgcgcggcaagtcccacgactggac

SEQ ID NO: 1387 - DNA, 320 bp, Eucalyptus grandis
  misc_feature (65)..(65): n is a, c, g, or t
ggaacctttttggtttttttttggcgctcgggcaccggttcgggagtttggctgcaatggctggntgaggcacagaatgaggttgcagtatcaagtgccttgttcaccgttcccaatcgtccttccaaagttgggtcacaattggaagctgtggataatctgaaagagttgcaggtcctggaaaatgaccagacacctaaggtgaggaagccttacaccatctccaagcaaagagagaaatggacggacgaagagcatgagaggttccttgaagctttgaaactgtatggccgcggttggcgtcagatagaagagcatgt

SEQ ID NO: 1388 - DNA, 409 bp, Eucalyptus grandis
ttcagttagtgctcttccaccctctaaagcctcatttcttcgtcgcaacgcagcagtaccgtccggatatacaacctgtccgagcaaaaattgttgaagacgctgacgcctggtatcaaatggatatcttccatggatgttcacccgtcgggcgatcatctcatcgttggtggctacgaccgaaaactgtgctggtttgacctggaactcagtgacaagccatacaagattttacgatatcacacacgcgccattcgttctttggcgttccacccaacatatccactatttgcgtcctcgtcggacgacggcgctatccaggtgttccattccagagtgtataacgacctgatgacggatcctttgatcgtccctctgaaaattctccgaggacatactgtaaaggaag

SEQ ID NO: 1389 - DNA, 313 bp, Eucalyptus grandis
cggactcggactcggccgagtcaacccacgccccccgcgagtcccgaccccccggcgccatgacgcggcgatgctcccactgctgcaacaagggccacaactccaggacctgccccgtccgcggcggcggcgtcggcggcggggacggcgggggcgcggcggccgccccctcctcctcctccccctccacctcctcctctggcgccgcggcggcggcggcggcctcggcctccggcggcggggtgaagctgttcggggttaggttaacggacgggtcgatcatgaagaagagcgccagcgtggggtgcctgtc

SEQ ID NO: 1390 - DNA, 329 bp, Eucalyptus grandis
  misc_feature (202)..(202): n is a, c, g, or t
cgagaatccagctccatcccagttcgacccatccgagaacaagtcaacccagatcgtcaaaatcgaatcttgactcgagggagaagcggagaatgacgaagcgcagcgcagccaaggccgcggcggtgcacgagggcgagggagcgaggagcgagctgaagttcagaggggtgcggaagaggaagtggggcaggtgggtctncgagatccgcctgcccaacagccgggagaggatctggctcggctcctacgacacccccgagaaggcggcccgcgccttcgacgccgccgccttctgcctcggccgcccgccgcgaagctcaacttcc

SEQ ID NO: 1391 - DNA, 156 bp, Eucalyptus grandis
cggacccgatgggcgagatggtcgcctccctcaggaacctgcagctcgacaaagtgaagtccatgccttgcggcgggtccacttccggctcgccgagggcctccaggatccgaccggggttctacagtatgcccacgacgccgacacagtccaccc

SEQ ID NO: 1392 - DNA, 555 bp, Eucalyptus grandis
  misc_feature (207)..(207): n is a, c, g, or t
gaagctcgacacgcgatttccggctgcaaggatcaagaagataatgcaagcagatgaagatgtagggaaaattgcattagcagttcctgttctagtctctaaagcattagaattatttttgcaagacctttgtgaccgtacatacgagataacacttcaaaggggagcaaagactatgaattcgctgcatttaaagcattgtgtgcnaagctataatgtgtttgatttcctgagggagattgtcagcagggttcctgactatggtcatggtcatggtcattcagatgctgtctctgaggatagaacagtgtccaggagaaggaaggccaccatcgatgatggtaatgacactgatgaggaatccaagaagagcaggatgcttgagatggcccatactggcagcagtggcagaggaagaggccgtggccgaggaagaggccgcgggcgtggtggccgagccactgagagggagactgcgcaccatgaaactgaatcatctgagccgaccacatctctgcaacctgtcaacaagaacattgtcaatcaaggaacagt

SEQ ID NO: 1393 - DNA, 525 bp, Eucalyptus grandis
cgcggatcccgcgagcgtctcccccaagtgccccttcggctacgacgcgccgccggattccggggccatctcccccaagtgccccctcggctacgactcgcagacgttcaagctcggccctctcagctgcatgatctgtcaggcccttctgttcgattgcgccaaatgcgtgccctgttctcacgtcttctgcaaggcatgtatattgcgatttaaggactgcccactctgtggagctgatattgagggcacagaagccgactcgaatcttcagagcacagttgatcggtttatcgaaggccatggtagaattaagaggtcccatgttgagaatgttgataaagaggaagttagcgcgaaggagacggtgatatatgaggacgtgtctttggaaagaggtgctttcttggttcaacaagccatgcgggcttttcgtgctcaaaatgtggaaagtgccaaatcaagactcagtgtctgtgctgaggatatcagagatcagataacaagaacaggcagcacgtcaga

SEQ ID NO: 1394 - DNA, 443 bp, Eucalyptus grandis
caatgtgtgggggcgccatcatctccgacttcatccccaaccagagggcccgccgattgacctcggacttcctgtggcccgatctgaagagatcggccggcaagcagtcgaggcggccggccaggtcggaggtcgtcgatgtcgtggacgatgacttcgaggccgacttccagggcttcaaggacgagtccgacgtcgaggacgacttcgacgacgaggtcgaggtcgacgtcaagcccttcgctttctccgccgccgagcctcggtactccaaaggctcttcaaccaccaaatctgtggagtataatgggcaagctgagaaatctgccaagagaaagaggaagaaccaatataggggaatcaggcagcgtccatggggaaaatgggctgctgagatccgtgacccaaggaaaggggtccgagtttggcttgggacgtttaac

SEQ ID NO: 1395 - DNA, 409 bp, Eucalyptus grandis
ccgaaatggcccagttggtatgcggaggctgccacaccttactcatgtacatccgaggagcgacaagcgttcagtgctcctgttgtcacacagtcaacctagccttggaagcaaatcaggtggcacacgtcaactgcgggaattgcaggatgctcctgatgtaccaatatggcgcacggtcggtcaaatgcgctgtttgcaattttgttacatcagttggtgcttcgtcaagcacactggaacagaagttcaccagctagaattagcaataaacctaccggtcacaggcctcacaactcatggttataagacttctattctactgccgctgccgccgccactgcacatcagcgtcatgaacgcaagctgagaaaatccctactagtttaacttgtatagagttaaaatc

SEQ ID NO: 1396 - DNA, 462 bp, Eucalyptus grandis
  misc_feature (145)..(147): n is a, c, g, or t
  misc_feature (150)..(150): n is a, c, g, or t
accatttcttccgaacacaagaggaggcgggtggtggtggtggtgttgctgcttctggtgccgtccacttccttcttcccacctccatcttcatctctccctccctctctctctctgaatctaccgaacccttctcgccgaaggnnnatnagagagagagagagagagagagacgggaagaccatcgctttcggccatcgcgtgcacgagcagtcatgaggagaggcagatgcgccgccgcggccgcgaagagggaggcggccgagatagcgccgccgccggtgccccatgcggctgcggcggcggcggcggaacccagatacaggggcgtccggcggaagtcgctgggccgatacacggccgagatcagagaccccgggacgaagaagctcgtgcggctcggcactttcggctcgccggaggaaagcggcgcgtgctttcgacgccaaggcccgtggcgtt

SEQ ID NO: 1397 - DNA, 407 bp, Eucalyptus grandis
ctctcgctctgcaatttcacaacgagtccgtcagtagtaggacctcattcacagctccagaaacccgaaaagatgagccaatccaccatgttggtagcggaagagaccatattttctccgccccctttgtataaccagcgaaaccatccccacgacggcgcctctgggctcaacccgttcctcacccaggagcactggggcgacctccctctccagctcaacgactccgatgacatgctcatctacaactccctccacgacgccctccactccggctggtcccctttcgactccgtcatcaccgccgtccaccccgagccccagccccaccccctcctccccgccgcttccgtccccacctccttcgcctccgacgagccctgtcgctccacaacgctttcgcctct

SEQ ID NO: 1398 - DNA, 456 bp, Eucalyptus grandis
ccgacctcctctctccacgcggccactgtcccgtcgcgcgaattcgccccgccgtcgtaggagaccgcatcctccgccgccgcggcgatggccccagcttcattccctgcgctagcaacgcatttcaatggaagtatgctcaatgatactaactcatctggtgaaagtcacacacgtaatggaaggccacgaggagatgccaggggaaggaatcaattacttcctcgttactggcccaggataacagatcaagagctacaacaaatctcaggagactcgaactctgtaatcactcctctgtttgagaaaatgttgagtgctagtgatgcaggtaaaattggacgtttagtgctgccaagaaaatgtgccgaggcctattttccgtctatttctcagcttgaaggattgccactcaaagttcaggatgccaaaggctcggagtggatatttcaatta

SEQ ID NO: 1399 - DNA, 474 bp, Eucalyptus grandis
aagttgaggaagtcgagttggagttctcggagggtgaaatggcggcttgattgagggccttgttggggcttgattggaaggatttgatggagctgttcattccaaaggcattgtcttcttgagatgcggacttcaaaccagcagcgtccttgttggatttggtggcggccctgcgagtcgtgccgttctcagacccagcttgctctcggctcttggtctcttccaagtacatttcttcgaccatgggcttccagaggcgaacccgagcgttgatgaaccagttagacacctggctcctggttagtcccgcttgttttgcgagcatgtgtttgtccgaatctttgggatagctgcaattgcaacacgccagaatgttgaatgtacaattgcaactcaaacataaagcgtggtcgtcaaccatgaacatggtttaaattactcctatgatctacagttgatcgaacttacctttgg

SEQ ID NO: 1400 - DNA, 443 bp, Eucalyptus grandis
  misc_feature (13)..(13): n is a, c, g, or t
gccccgtcttccncaaggccatcggcgagctccacggccactccggcatcgcgcggctcatgctcttctacgcccgcagcctcttcggcctcgtcgaccaccggaatggcatgggcgtcgcgaacgccggcctcgtgtacttcgacggccacctcctcgcgatgtccgaggacgacctcccctaccacgtgcgcgtcacgcgctccggcgacctcgagaccgtcggccgctacgacttcgccggccagctcgactctccgatgatcgcccacccgaagatcgacccggcttccggcgagatgttcgccctcagctacgacgtcgtccggaagccgtacctcaagtacttccgattctccaaggacggcgagaagtcccccgacgtcgagatccccctggctgagccgaccatgatgcacgatttcgccatcaccgagcgcttt

SEQ ID NO: 1401 - DNA, 481 bp, Eucalyptus grandis
atgagctgagaatagccgaagcatggatgtggagatagcggcgacagcggcgggacgctgaatatactctccttgttcccttccccaacgtcccagaaccccctccagctcgacggcgtcagcggacatgtatccctgccgctcgccacgtccgcatgctgctccttcttcaccactttataactgccgccggcactcatctcggactcggcgctctccgcggcggcttcctctcttgctctcttgcgagaagcatccgccggggccagcgacggttccgtcgacgtcggctcgtcgcggcccgcctcgagcgggaagttcaggatggccttgctcccgcggagcctgaacgcggcgcggtcgtaggccttcgctgcctccaccgccgtgtcgaacgtccccagccacacgcgcgtccccttgcgcgtcgggtcgcgtatctccgccgcgaacttcccccacggccgccggcgcacgcccc

SEQ ID NO: 1402 - DNA, 384 bp, Eucalyptus grandis
catgacccgacgccgccggcgaacgactgggtcatggagaccaggaagaaccactcggtgtcggcggcgtcgggttgcccggtcgggcctacttcagctcgaatcccgcgtgggtcacgggggccgagaggttggggaattgcgggtgccgatagggcccggcaggcgcagatcttcgggttgcagaccatcgcgtgcgtccctgttttgaacggtgtggtcgaactgggttccaccgagccgatctaccagagctccgatctgattagcggaattagggggctgttcaatttccatgaatcggagatgggatgcggtggtagggttttgaatagcgagcatgacccggcgtcgctttggatctgcgatccgccagtcacgatg

SEQ ID NO: 1403 - DNA, 380 bp, Eucalyptus grandis
ctctctctctctctctctctctctctctatctttgatacccaaacaaaacacacggaaaagaaaaacccacaagcacgccatggacaacaatgttgaggaataccagaactattgggagacgaccatgttctaccaaaatgaagagctcgacagttgggtggacgaggcgatatccgggtactacgactcgagctcccctgacggggcggcgtcgaccgctgcttccaagaacatcgtgtcggagaggaaccgaaggaagaagctcaacgagaggctattcgcattgagggcggtggtgcccaacattagcaagatggataaggcatccatcatcaaggatgcgattgactacatccaagagttgcacgatcaagagaga

SEQ ID NO: 1404 - DNA, 432 bp, Eucalyptus grandis
ccaacatcgttctcgagaaccccactccatcccagttcgacccatctgagaacaagtcaacccagatcgtcaaaatcgaatcttgactcgagggagaagcggagaatgacgaagcgcagcgcagccaaggccgcggcggtgcacgagggcgagggagcgaggagcgagctgaagttcagaggggtgcggaagaggaagtggggcaggtgggtctccgagatccgcctgcccaacagccgggagaggatctggctcggctcctacgacacccccgagaaggcggcccgcgccttcgacgccgccgccttctgcctcggccgccccgccgcgaagctcaacttccccggcagccccccggagatctccggctcggcgtccctctcccccgatgagatccagtcggccgcggcgagctacgccaacttcggggcc

SEQ ID NO: 1405 - DNA, 345 bp, Eucalyptus grandis
ccgacctcctctctccacgcggccactgtcccgtcgcgcgaattcgccccgccgtcgtaggagaccgcatcctccgccgccgcggcgatggccccagcttcattccctgcgctagcaacgcatttcaatggaagtatgctcaatgatactaactcatctggtgaaagtcacacacgtaatggaaggccacgaggagatgccaggggaaggaatcaattacttcctcgttactggcccaggataacagatcaagagctacaacaaatctcaggagactcgaactctgtaatcactcctctgtttgagaaaatgttgagtgctagtgatgcaggtaaaattggacgt

SEQ ID NO: 1406 - DNA, 471 bp, Eucalyptus grandis
actgggcaaaatattcctatctctactgcatatatagggctcgggagagagagagagagagagagactgcacagtatagtaatactaaataatacacctcctttagacttgactgaagatacaggcacaaccctagtaagagaagaaggagaaggggaagatgaaggtgagaaggaagctgagggagcccaggttctgcttccagacgaggagcgaggtggatgtgttggacgatggctacaaatggaggaagtacggccagaaagtggtcaagaacagcctccaccccagaagttattaccgttgcactcacagtaattgccgagtgaagaagagggtcgagcggttgtcggaagattgtcggatggtgataacgacctacgagggcagacataaccattccccgtgcgatgactcgaattcatccgaacatgaagggttcaactcgttctagtattgccccaagacaga

SEQ ID NO: 1407 - DNA, 471 bp, Eucalyptus grandis
agcaagcaaaagaggaaaccagataaaagcagacacctcggtttcacgttctctactacagaattccggagatggtgaagagagacagagaggacacggaggtcgaagccctggccctggccaactgcttgatgctcctctcccgagtcggcgagagcaccgactcgccatggctgaaccacaaatcccggcctacggagcggatgttcgcgtgcaagacgtgcaaccgcgagttttcatccttccaggcactcggagggcacagagccagccacaagaagccgaagctgtccggcgatctctttcacctagggcgctccgcggattcctcaccggccaagccgaagacgcacgagtgcgctatatgcggcctcgagttcccgcttggcaagcccttggcggtcacatgaggaggcacagggccgccatggcggagagcttggcgacggccgaaaagcctgtgccggtgtt

SEQ ID NO: 1408 - DNA, 303 bp, Eucalyptus grandis
gcgcccttctcgaatccatacgaggagctggcgaaccacttgctgctggacgatcccgaatcggacctttcggttcacttcccttccttcgcttccgatcccgaaccctgcaactccgctgtatctcctagttttagcgtggatggggatttcctttccgactatggcgacacctcggatcccacgttgaaatacataaatcagatgctcatggaggaggacatagatgacaaaccctgtatgtttcatgatcctttagctctcaagctgcagagaaatccttatacgatgctctctgtccga

SEQ ID NO: 1409 - DNA, 367 bp, Eucalyptus grandis
aatctcaggagactcaaactctgtaatcactcctctgtttgagaaaatgttgagtgctagtgatgcaggtaaaattggacgtttagtgctgccaagaaaatgtgccgaggcctattttccgcctatttcccagcctgaaggattgccgctcaaagttcaggatgccaaaggctcggagtggatatttcaatttcgattctggcccaataataacagtagaatgtatgttctggaaggagtcacgccgtgcatacagtccatgcagttgcaagcaggagacatagtgacatttagtcggttagaacccgagggaaaattggtcatgggattcagaaaggcttcaactgctccctcatctgatcaggaa

SEQ ID NO: 1410 - DNA, 353 bp, Eucalyptus grandis
cattaccaccaccaccaccaaaactctctctctacccttctctctctgcccttctctctctagaatttatggcgatgaaggagaaggcgggttcgggcggcggcgccaggctggcggtgagggaggcgcactaccggggggtgaggaagaggccgtgggggcggtacgcggcggagatcagggacccgaagaagaagagccgggtgtggctcggcaccttcgacaccgccgaggaggccgcccgcgcctacgactccgccgcccgcgactgccgcggctccaaggccaagaccaacttccccctcccctcggagcgccccgtcctcctcctcgccggagccgacggaggagca

SEQ ID NO: 1411 - DNA, 586 bp, Eucalyptus grandis
  misc_feature (28)..(28): n is a, c, g, or t
  misc_feature (448)..(448): n is a, c, g, or t
atcaggtcccgcgccactccattcgcgnatctccgacctcctctctccacgcggccactgtcccgtcgcgcgaattcgccccgccgtcgtaggagaccgcatcctccgccgccgcggcgatggccccagcttcattccctgcgctagcaacgcatttcaatggaagtatgctcaatgatactaactcatctggtgaaagtcacacacgtaatggaaggccacgaggagatgccaggggaaggaatcaattacttcctcgttactggcccaggataacagatcaagagctacaacaaatctcaggagactcgaactctgtaatcactcctctgtttgagaaaatgttgagtgctagtgatgcaggtaaaattggacgtttagtgctgccaagaaaatgtgccgaggcctattttccgtctatttctcagcttgaaggattgccactcanagttcaggatgccaaaggctcggagtggatatttcaatttcgattctggcccaataataatagtagaatgtatgttctggaaggagtcacgccttgcatacagtccatgcagttgcaagcaggagacatagtgacatt

SEQ ID NO: 1412 - DNA, 427 bp, Eucalyptus grandis
gcttttccttacctaagatcgccagtagatcatcgctccatttcgctccttctcctccatcgtcttccggttggtgtttcgggaagccatggatcttgagtacccagaagagttcttgggcggtgcccacgaccaccattcgcagatctccaagggcaagcgcacgaagcgccagcggccggcctccccgagcggcggcggctgcgtcggcgccgacgccggcgtggccaccgggagggccggcttctacgtctacgagtgcaagacttgcagccgcgtgttcccgtcgtttcaagcgctaggagggcaccgtgccagccacaagaagcccaagtccacggccgatcctgaccagaaaatcaagccgtcgacggtggtcctgggcttggacgcaattgacgacgaagacgaggggcactccggtaaa

SEQ ID NO: 1413 - DNA, 375 bp, Eucalyptus grandis
gaaagtgacccactggctgccctgtgtaatctggaaatcgacaatgtgaattctctgttcgttttccatggctttggtgatgatgacatttgtggacacatatgcaaacttccagtaggggcagatctgatagagaacctgcatgttagtcagcaattctgagctcgtaggttcttcgcacttgagctttcggtaaattatgctcccggaaaatttcaatttcgccctaagcccttccaagaggtaagcaccaagacgctgaatcgggtcgcccataaccgacaccatttgctccagcatatccattagagctgctgcactagaagtatcggcatcagagattgcccttgccaggcgattaccacttgtttcaag

SEQ ID NO: 1414 - DNA, 369 bp, Eucalyptus grandis
ctcaaaatggacttgtgctgataacagttgggatccagaaagatcatcttgctcggcggatcaagacttgacggcagaagagcttgaagatatgctatctaataataatccagcaccttctaagaaagctaaggctcctaaacaagagaatatggaagcactggaggggctggatactcttgccaacctagcaatcttaggagaaggcgaggtgctcccatcatcttcttcatcatctcaagccacaacaaagcaccctcgacaccgaccagggtgttcatgtattgtttgtatacaaccccccagtggaaagggcccaaaacacaagccaacatgcacatgtaatgtctgtctgaccgtaaagcgcgt

SEQ ID NO: 1415 - DNA, 313 bp, Eucalyptus grandis; identical to SEQ ID NO: 120

SEQ ID NO: 1416 - DNA, 489 bp, Eucalyptus grandis
ctcttcgaaaaccctttctctctcttcgatctctctctctttctctctcctctgtgattgcagatcaggctcccacgccgttccattcgcgcatctccgacctcctctctccacgcggccactgtcccgtcgcgcgaattcaccccgccgtcgtaggagaccgcatcctacgccgccgcggcgatggcggcgccacgaggagatgccaggggaaggaatcaattacttcctcgttactggcccaggataacagatcaagagctacaacaaatctctggagactcaaactctgtaatcactcctctgtttgagaaaatgttgagtgctagtgatgcaggtaaaattggacgtttagtgctgccaagaaaatgtgccgaggcctattttccgcctatttcccagcctgaaggattgccgctcaaagttcaggatgccaaaggctcggagtggatatttcaatttcgattctggcccaataataacagtaga

SEQ ID NO: 1417 - DNA, 372 bp, Eucalyptus grandis
catcggcgagctccacggccactccggcatcgcgcggctcatgctcttctacgcccgcagcctcttcggcctcgtcgaccaccggaatggcatgggcgtcgcgaacgccggcctcgtgtacttcgacggccacctcctcgcgatgtccgaggacgacctcccctaccacgtgcgcgtcacgcgctccggcgacctcgagaccgtcggccgctacgacttcgccggccagctcgactctccgatgatcgcccacccgaagatcgacccggcttccggcgagatgttcgccctcagctacgacgtcgtccggaagccgtacctcaagtacttccgattctccaaggacggcgagaagtcccccgacgtcgagat

SEQ ID NO: 1418 - DNA, 354 bp, Eucalyptus grandis
gcggaatttgaatatcagaggagcacaaagcagccagcagtttgcgtggaggagaatgagttagctgacattttcgatagggttctactttgtgctccgacgggaaataagcctgattctaaatctcctggttctagatttgaggatgcctcaaataatggggcaagccagaatgtacagaaaaatcgcaatcacctgcactttcagccgaacagctctgtgtcaaaaaaccaatgagtgataagaaggaagtcgtggatctgaggaaccttctgtgttcttgtgcacaagcagttgccgtggaggatcgtaaaaatgctaatcaatatctgaagcagattaggcagcactcct

SEQ ID NO: 1419 - DNA, 540 bp, Eucalyptus grandis
ctcaatcggagttgggctggctgtgatatctgtgtccgcggccagggccgccatgctttttgccagcccgatggcgttgtaaatcgctgaaccgtaagaacggcagtaaacaagtgtcgcatgagtacggctttttgccgctgtgtgtcgccatgtgtttcttcaaattgcccttcaatgcaaatcgtttcccgcattgatcacattcgaacgggcgcaccttcgaactcgaatgagatgcgacatgacgcgttagtgcttcctcgaaatgaaaagactttccgcaaagtttacacgggaactcgcgcagcacatcgtactgtgtaggaacatattcgtctcctgaatcattgtccatcgctgtagaatcattttcttcttcttccgtagactcgttcgaattgttgttttccgttgaggtcgtcgcagattcaggagatccagcaggattggagataactggctcatccacaggcaacaacgcgatttcggcgagattttccatcaggatgggctccacagtgaccggagggccccctg

SEQ ID NO: 1420 - DNA, 349 bp, Eucalyptus grandis
gatgggttcaaacagtcttatgggcttggtgggaagagatcatcatcgattcggcctcccgaacaagagagaaagaaaggggttccttggaccgaggaagagcacaagctctttttgatgggtctaaaaaaatatgggaaaggtgattggagaaacatctccaggaacttcgtgatcacgagaacaccgacgcaagtagctagccacgcacagaaatacttcatcagacaactttcaggtggaaaagataagagaagggccagcatccacgatatcacaactgtgaatctcacagagactagaactccttcaccagatgataaaaggccgccttcgccagatccttcat

SEQ ID NO: 1421 - DNA, 378 bp, Eucalyptus grandis
  misc_feature (248)..(248): n is a, c, g, or t
ccgaggccgacttcctggccaaacactccaagcccgagatcgtcgacatgctgcgcaagcacacgtaccgcgacgagctagagcagagcaagcggagctacaggggctccgccgcggaacgggccgggaggggcgggttcgggccggggcggacagagtggtcggccgccgcccgggagcagctgttcgagaaggccgtgacgccgagcgacgtggggaagctgaaccggctggtgatcccgaagcancacgcggagaagcacttcccgctgccgggcgggccggcggcgacgatgaagggcgtactgctcaacttcgaggacgtcggcgggaaggtgtggcggttccggtattcgtactggaacagcagccagagct

SEQ ID NO: 1422 - DNA, 358 bp, Eucalyptus grandis; identical to SEQ ID NO: 214

SEQ ID NO: 1423 - DNA, 373 bp, Eucalyptus grandis
catcctatgaagccggaatctgttgaagtactgaatttcggagatagtgggagcggaaggttgctttcgagtcattcacaggtcgcagttgcagaggagcctctgaaccacgtcgaggcggagaggcagaggagggagaagcttaatcagaggttttacgccctcagggccgtggttccaaatgtatcaaagatggataaggcttcactgctccaagatgcggagtcttatatcagggagcttaacatgaacctacaagctgcagagtctgataaggaggatttgaagaagcagttggatgaactaaagaagcgatcatcggataaagaatgtatcccggtggatcaagatcgcaagatggcaaaacctacgg

SEQ ID NO: 1424 - DNA, 425 bp, Eucalyptus grandis
  misc_feature (187)..(187): n is a, c, g, or t
  misc_feature (208)..(208): n is a, c, g, or t
  misc_feature (235)..(235): n is a, c, g, or t
gcgaaccgagcgcgaatcggctaatgttcatcggaagcttctcataagaggaggggtccgaggcttcaattttcgagcagggctcatggatcgtcggttctacaccaaccccttcgtgcatgatcaagaagaagaccccgagcccgagcaaggccctgattcgccctcctcgggggaagactccaangtgaatgctatcgagccgtcncaaaagagaaggaagagcgtgaagaancgagtggtgtcggttccgatcgcgggcgaccccgagggatccaagagcaaaggggaggcctacccgccgtccgattcgtgggcgtggaggaagtacggccaaaagcccatcaagggctcgccttacccgaggggatactaccgatgcagtagctccaagggctgccccgccagaaagcaagtggagcgca

SEQ ID NO: 1425 - DNA, 434 bp, Eucalyptus grandis
gcactttcagcttcggcatcctgaaggccggcgagggaggtgatggtgtcgcggacgacgaactcggggtgacgaggcagctgttcccggtgagggaggtggatgcggatatggagtggtgcggcgagtcgtcctcgcttgataagaggagcgatgtcttcttggttggtgcttgtaaggaaaaggaaggtccgaggctggcgatgccgcagcagcggaggaagagcaggaggggaccgaggtcaaggagctcgcagtatagaggggttactttttataggaggactggaagatgggagtcgcacatatgggactgtggaaaacaagtgtatttgggtggattcgacactgcacatgctgcagctagacctatgatcgagctcaataaaattcaggggcttgatgcaacataaatttcaatttgagtgattatg

SEQ ID NO: 1426 - DNA, 414 bp, Eucalyptus grandis
gccagtatgaactctcctttagcccagcttgttaacccaagaaggatgcacacctacgagccatttgaccagttccccatgtggggagacaccttcaaagctgacaaggttaaaaatcttgaggcatcgtcatctgtgattgtgcatgcagtagatgatggattggacaagaagtttgaatatgtttctcatgaatcggcagaaaattccagctccaggagcgatcaagaagcaaatagacctgacaaggtacagagacgtctagcacagaaccgtgaagctgctcgaaaaagccgtctgcggaagaagaaatatgtacaacaactagaatcaagccgcttgaagctagcacagttggagctggaactcgggagagctaggcagcaagggttgctcttgggaaatggattcgac

SEQ ID NO: 1427 - DNA, 332 bp, Eucalyptus grandis
aaaagccctagctaaatcaattaacaagcgctaatcctaaaagcacaggcgaagatttcactgttctggagagagcttgatcttcaggggcgtcgagaagcgcggcttcttcgaggggtgggggctctccacctcgtcgtcgcccgacacgatgaacccggtcgggaactccggcagcgcgggcacgttcaggtcgaagttgcggcggccgctgtcgtatccgagcgcgggcggggccgcggaccccacgccctcggacgtggtgaccccgctgttggcggagccgctggcgccgccatcgtagtggcaacgcttgtgcccgcccagggcct

SEQ ID NO: 1428 - DNA, 318 bp, Eucalyptus grandis
gatccacccaactggccacagcagcaagcaaatcaacaatcaggagcaagcagtgagattcctcagcttccgctgccgccgccccctctgccagccggagggggcggtacaggctccatccggccaggttccatggccgatcgggctcggctggccaaggttccgcagcccgagcctggacttaagtgcccccgatgcgactcgacaaacaccaagttctgctacttcaacaactacagcctcacgcaaccgcgccacttctgcaagagttgccgccggtactggacccgaggaggtgcgtgaggaacgtgccagtcg

SEQ ID NO: 1429 - DNA, 349 bp, Eucalyptus grandis
gaaagcctaaagaaagcagatacaacaggaaaaggaggacaccaatacagatggttttacagaaagattcacaagaactaaaccgtcgctgatcttaggcacgagtcaagctgcttgagtggcgccatccttgcagttgtcgagatccgattcattgactgaagaaggcgccttgataaatgctgactgtcgagatgtttccccgagaaacttcaaagagagtggtgcaggttcattctcagcaagacttagctgagacattccaactatttggtcgatatttaggggttcttttggaattactgggattggctttagcacacggtgatgagatgtctccaccaccctt

SEQ ID NO: 1430 - DNA, 350 bp, Eucalyptus grandis
aacgcccgttctccacaacaagcgactctctctctttctctctctcctccaactaaaatcccaagcctcccaagtctctccgaccatggctccccgggagaggcccaacgccgtcaccgtcgccgtcagccccaggccccagggcggcgccaaggagatccgcttccgcggcgtcaggaagcggccgtggggccgctacgccgccgagatccgcgacccaggcaagaagacccgcgtctggctcggcaccttcgacaccgccgaggaggccgcccgcgcctacgacacggcggcgcgtgagttccgcggcgccaaggccaagaccaacttccccaccgccgacgagctcg

SEQ ID NO: 1431 - DNA, 350 bp, Eucalyptus grandis
aaccgacgacacaggtgacaagaatcacaggttcgaagggggtcaattgggtgttgcagcagcttctgattccagtgacagatcaaaagaaaaagccacagatcagaagactttacgcaggcttgctcaaaaccgtgaagctgccagaaagagtagattaaggaaaaaggcatatgtccaacaactggagagtagcaggctgaaactcacccaactagagcaagaactgcagcgagcccgtcagcagggcattttcatttcaggtagtggagaacaatcccactcaatgagcggaaatggtgccctggcctttgatgttgaatatgcacgttggcttgaagagcacaaca

SEQ ID NO: 1432 - DNA, 317 bp, Eucalyptus grandis
  misc_feature (156)..(156): n is a, c, g, or t
cggggatacaggtgctggcaggtttaactacttaaatgataggtattattatcatcacaaaggtcgggttctggctgttaatggacatatgaatggtacttattatggcactggaagagggtcttccggtggaacatacagtactggttgtagtanaggctgtggtggcaggtcagactataagatcacgagaaaagatagggaatctatgcccaacatgagcgagcctcttgttgcctctttgtatgttcctaggaatgataagcttgtgaaaattgatggcaacttgataattcattctattatggcgagtgaga

SEQ ID NO: 1433 - DNA, 370 bp, Eucalyptus grandis
gctcaatgtagtcatcaagaaataaacatcctttagcaacgaaagccagaaagcctgaatctctaacggaaacttacatgcacgtgcatattaggccataaaaacatgacagataaaatacaaaatccctttttctaatgtgtaacatttttcggcagatttctaatgacattactcttcatcccaattttggtgcgcatcgcctccactcctgatcgattcatctctcttatcaccttcagcctgaccatttgttctcttgaccgtacagtggtagttaatcccatactcctgtaccttgaggccagtgcagcagtaattgccgcattatttccagttgatggacgaggtttctggcggtagtatctca

SEQ ID NO: 1434 - DNA, 210 bp, Eucalyptus grandis
gaaaagcgtacgcgaggaggcagcatgcgtggctcaccggagctaatgaggttgatagcaagactttttcgagagctattcttgcaaagagtgctcgtattcagaccgtggtttgcatccctcttctagacggcgtagtgcgatttggcaccacggaaagggttcaagaggacatttcactcgtcaatcatgtcaaaaccttcttcgttg

SEQ ID NO: 1435 - DNA, 557 bp, Eucalyptus grandis
ggtcgttcgacaacaccctgtcgctgctgagccgcgccgagcccgacgaggtgtcgcaggtgccggtcaggccctgcgccgtcaagtccgaggactccgaggagagcagcaagacctcggtccccagagaccgccgtggatgctacaagagaagaaagacttcggatacacagataaggatggatcataatttgattgacgacgggcaccagtggaggaaatatggccagaaagcgattcttaactcggagttcccaaggaactacttcaggtgtactcacaagatcgaccaaggttgtctagcgaccaaacaggtccaaaaggtacaggacgctccgcccctctataggaccatataccagggccaacacacctgcaagaacctcatcctgaaatccccctccctcatcctggactcgcccgagccctggggactcctccatcctcgtcagcttcaacaccagcctccctcccaagcaagacgacaacaacaacagcagcagcaaccccttctcctcttcgactttcccgtcggtgaagcacgagcccgaagctgc

SEQ ID NO: 1436 - DNA, 438 bp, Eucalyptus grandis
  misc_feature (11)..(11): n is a, c, g, or t
  misc_feature (29)..(29): n is a, c, g, or t
aatcaacaccnctccccaatttctctctntaagatcccaccccaaccgccaccctcaatctctctctttctctctcttcttcagtgtctgccccgtctgcgacaagggcttcccctcctaccaggccctgggcggccacaaggccagccaccgcaagcacgcctcctccgccgcggccgccgccgggggtgacgaccagccgaccacctcgagcacctccgcggcgacgacctcctccggcgtctccgggaaggtccacgagtgctcgatctgccacaagagcttccccaccggccaggcgctcggcgggcacaagcggtgccactacgaggcccccgcccccatccccgcctccttctccgccccctccgccgccgccgccccggccgccagcggggtgagcgtgtcggagggcgtggggtccacgcacacgcagag

SEQ ID NO: 1437 - DNA, 327 bp, Eucalyptus grandis
tctctctctcttcgtttctcccgtttctctctctctacctctcgccaagaaaccgccaggaaaggaaggaaggtaaaaagaaaagaaaaggaagccatggctccgagagaaaagcccagcgtcgccgccatcccaaaccctaacggcgctaaggaaatccgtttccggggcgtccggaagaggccctggggccgctacgccgccgagatccgggaccccggcaagaagacccgggtgtggctcggcaccttcgacacagccgaggaggccgccgcgcctacgacaccgccgcccgcgagttccgcggcgccaaggccaagaccaact

SEQ ID NO: 1438 - DNA, 360 bp, Eucalyptus grandis
gcgagagctaaccgccaaaattacccagctctcatctttcccacttcaacaaaaataccggaccgaaagaatgtgtatacatatgtctatttgatagcataagaacgggtacataccgtgtcaaggacctccatgaacaaggatgaaaaactggctaatgcctggaaaactcctggcagacccgtttgaagattgttcaaggtacttgtcctcgtcacttccactgccttggaatgtttcagcatttcttcttctaccctcctttggcaggttgcaagttcaagtttcttctcggccagtgggtcccgagcatccagcacctggccattgtcgggcccaggatcagggaaccctacacca

SEQ ID NO: 1439 - DNA, 269 bp, Eucalyptus grandis
ccgaaacggaatcgttcttggggtttgaagcgaagccggtaattatcggtgaaacggcctcgaaaacctcgcaatcaagcaagaagccatcgctgaagatcgcggtgccgagaaaagtcgagctgctgcaattctccaaggcgaatccgatggttcaaggaggttcgaatcaagcacgcgacgagcagaggcactatagaggagtccggcggaggccttgggggaagttcgcggcggaaatccgagaccccaaccggaagggctcgcgc

SEQ ID NO: 1440 - DNA, 351 bp, Eucalyptus grandis
aagaagacgaagcagctcatccgaccatggtgttggtattgcgaacgagaatttgaagatgaaaaagttctcatgcaacaccaaaaggcaaaacatttcaaatgtggaatgtgtcctcgtcgtttgaatactgctggtggtttggctgttcatattcagcaagtgcacaaactcgaaccggaaaaccttccacgtatagaaaatgcactaccaggaagagatggctacgaagttgaaatctttggtatggtgggaatcccagcacctgatgtcgccgactacaaacgacgcaaggaaatcgaactgggactggcagcaggatccatttcacagcctcctgccaagcgtcag

SEQ ID NO: 1441 - DNA, 476 bp, Eucalyptus grandis
  misc_feature (30)..(30): n is a, c, g, or t
gatagtccaagctctctgcctctctctctntctgtattctctatcttcatctgcggcgtcttgatcgctctcatctcgctctcgcgaatgttgtctctcgtcttctcctctgtccgccattcaaagatcacctattctttccgtttggtttgcggtgactaagaactctttctctctctcgctctgagtcactcttgctttctcccgacttttctgggattgatgaaaatggcggaaagatcgaacttgtcggacccggaaacaagccccttgaactcaccctccacctcctccgcttcttcctcgtactcacccgacccgcgccgccgggccggctcgcccgccgcggtccgcgacccgttgagatcctccaagcggagcaagcacccggtgtaccgcggggtccggatgaggaactggggcaagtgggtgtcggagatccgggagccccgcaagaagtcccgcatctggctcgg

SEQ ID NO: 1442 - DNA, 315 bp, Eucalyptus grandis
  misc_feature (6)..(6): n is a, c, g, or t
  misc_feature (29)..(29): n is a, c, g, or t
  misc_feature (45)..(45): n is a, c, g, or t
  misc_feature (171)..(171): n is a, c, g, or t
gcaagnactttgaacctgggaatcatgtnaaggtcgtttctggtncccaagaaggtgctactggtatggttgtaaaggtggagcaacatgcgctgatcattttgtcagatacaacgaaggaactattaccgtttttgcagatgatgttgttgagagttcagaggtaacatntggaataaccagaattggagactatgagcttcacgaccttgtgctgctggataataccaacttcggtgtcataattcgtgttgaaagtgaagcttttcaggtaggtgacatgcactgaggcaagtctcttggacatgcccttca

SEQ ID NO: 1443 - DNA, 338 bp, Eucalyptus grandis
ctcagccgagcttcagagggaaaccgccatgccctcgcgaaagtcactctgccacacttatcgggaacgataagatggtcatttttgggggtagtggccaaggcgaagcgaactattgaacgacctgcatattctggacctagagacgatgaggtggatgtctcctgaggtaaaaggcgagattcctgtccctagggacagtcacagcgctgttgccatggaaaacaaattagtggtgtatggtggagattgtggcaatcggtatcttggcgatgttgatgtacttgatacggacacaatgacctggtcaaagttgactgttcaaggattttcacccg

SEQ ID NO: 1444 - DNA, 409 bp, Eucalyptus grandis
  misc_feature (98)..(98): n is a, c, g, or t
gccaaggccacaaccatcaacaccaccaccagtttggccgtgatcattcttctccctcttcggtcgccatggctggtgcggcagggggtttagagagngagaacggcggaaatgggagatggcctatgcaggagactctcacgctcctcgagatcaggtccgaggctcgactctaggtttaaggaggccaaccaaaagggtcctctttgggacgaacttccggattatgtcggaagaacatgggtatcaacggagcggcaagaaatgcagggaaaaattcgagaacttgtacaagtattacaagaagacgaatgaacgaaaagcgggtaggcaagacggttagcactacaggttctttcgtcaagctcgaagctctctacggagagaacgccaatttgaattccatcct

SEQ ID NO: 1445 - DNA, 304 bp, Eucalyptus grandis
gaactgttgtacatggatggacaggctgacatcaagcagcgccaatcctccattaatgccttcaatgacccaacgagtgaagtgagggtgttgcttgcctctaccaaagcatgttccgaagggattagtctggtgggtgcttcaagggtcgtgttactagatgttgtgtggaatccgtcagttgacaggtaggccataagccgtgctacagacttggacagaagaatgcggtctatatttatcatctgatcacttctgggacaatggatgctgagaaatactgtcaacgggtgtaaaaggacac

SEQ ID NO: 1446 - DNA, 332 bp, Eucalyptus grandis
ggctccccgggagaggcccaacgccgtcaccgtcgccgtcagccccaggccccagggcggcgccaaggagatccgcttccgcggcgtcaggaagcggccgtggggccgctacgccgccgagatccgcgacccaggcaagaagacccgcgtctggctcggcaccttcgacaccgccgaggaggccgcccgcgcctacgacacggcggcgcgtgagttccgcggcgccaaggccaagaccaacttccccaccgccgacgagctcgtcgtcgccgtcgccgccgccgcccgcagccccagccagagcagcaccgtcgacaacgcctcccctccgc

SEQ ID NO: 1447 - DNA, 349 bp, Eucalyptus grandis
gtaaaacaacctccctcagctcctcttcaccactggtttttgagatgatctgtgtgctcggcgccgttgattattatgtcttattctgacttgctgaacctgctgtttgccgtgggcgtttggtgcaccgcgtatattgcggctgccgttctcgagtcgctccgggtcttccatactctctgttcgttttgatttcgatagctgttttcgaaggctaagatgggctacgcacagctggtcatcggccctgccggcagtggcaagtcgacttattgctcgagtttgtatcaacattgtgaagctattgggcggacaatacacattgttaacctagatcctgcagcagaga

SEQ ID NO: 1448 - DNA, 362 bp, Eucalyptus grandis
ccgcaacgaggcgataccatctccggcccgcgtcttgctcttccctctccaatcccatccatccctccatccatccatccatccgcccgaaccctccctttctctctccatctctctcgcgcagcatgattccgagccgagccgccgcggcgcccgacgacgtcccggaagtcgccggatcggcaccgaaggggcacgtacaacagcagcagcagccgcagcaacaggtcggcgccggcagcccaagtacaggggcgtgcggaggcggcggtggggcaagtacaccgccgagatcagcgaccccgtcaagaaggcacgcgtctggctcggcaccttcgcctccgccgaggagggcgccgcgc

SEQ ID NO: 1449 - DNA, 281 bp, Eucalyptus grandis
  misc_feature (106)..(106): n is a, c, g, or t
cagcagaccagaccattccattccattccatttcgcattctctactacagactcgcagagatggtgaagagagacagagaggcgcggaggtcgaagccctggccgnggccaactgcttgatgctcctcccccgagtcggcgagtgcgccgactcgaaccgcgaatcgcggtctacagagcggatgttcgcgtgcaaagacgtgcaaccgcgagttcttctcattccaggcgctcggagggcatagaaccagccacaagaagcagaagctgatccccggcgg

SEQ ID NO: 1450 - DNA, 389 bp, Eucalyptus grandis
aagaagacgaagcagctcatccgaccatggtgttggtattgcgaacgagaatttgaagatgaaaaagttctcatgcaacaccaaaggcaaaacatttcaaatgtggaatgtgtcctcgtcgtttgaatactgctggtggtttggctgttcatattcagcaagtgcacaaactcgaaccggaaaaccttccacgtatagaaaatgcactaccaggaagagatggctacgaagttgaaatctttggtatggtgggaatcccagcacctgatgtcgccgactacaaacgacgcaaggaaatcgaactgggactggcagcaggatccatttcacagcctcctgccaagcgtcagaaaatggatcaccggccgatatctcagagcgaattgaag

SEQ ID NO: 1451 - DNA, 381 bp, Eucalyptus grandis
gctgcgctgccccttcccttttgaccgttgctcctcccccttctctctctaccaacgtctctctctctctctctctatctgcactgtgattccctcaccttctcgcagcctcgccatcttccctcctcccaactcctcgctccttcgctcgctcgctacagtccagatatttcgcgatcaatctcgaacagcttacggagatccttatgtatctggtgataagcataagagaacacccttgtgaattccgtttcgatttgcattttaaaagttcatagtgtgaagagagttggaaatctgaggtgcaagatggggtgttcctcatcaaagcttgacgatgaagaggcggtcaagctatgtaaggatcggaagcgattcatt

SEQ ID NO: 1452 - DNA, 381 bp, Eucalyptus grandis
ggcgagctctcttatcttcttcttcctcctgctccacctaaaaccctcgcccggcaaaaccgattcgaggtcgagagtcgagtaaagatgaatgtggagaagcttatgaagatggcgggttcagtccgcactggtggaaagggtaccatgagaagaaagaagaaggctgtgcacaagacaactaccacggatgacaaaaggctccaaagcactctcaaaagaattggggttaatgctattcctgcaattgaggaagtcaacattttcaaggatgatgttgtcatccaatttgtaaatcccaaagttcaagcctctattgcagccaatacatgggttgtcagtggtgctcctcagaccaagaaattgcaagatatcctccca

SEQ ID NO: 1453 - DNA, 378 bp, Eucalyptus grandis
ttttttttttttttttacgcaatggaagaacaaactgttttccaactgaaagtacaaataactcctaatctagaattaggtaaatgcttaaatcctgctacctacaaatgtgaaccacgatgacaaggttcccaacaccaaatgtttggtacgatgtgaaaacttgacgacctgacagcaattagcatataccaacctaacgaaactacgagggggagagagcttatgggcacggcaccagctatatcaagtacgcactctcttattgctgcaggagggacacttgtactgcttgatgtgctcagccctggcgggagtaattttcacgcatttcccatggaaccacttctcgcacatgtcacaacagatccagaactc

SEQ ID NO: 1454 - DNA, 339 bp, Eucalyptus grandis
atgctgctgccacgaacagccgctttacaatcttttacaatccaagggccagtccatcggagtttgtcatacctctggcaaaatatgtgaaagcagtctatcacacaagggtatctgttggcatgcgattcagaatgctttttgagacagaagagtcaagcgttcgtagatacatggggacgataacaggcattagtgatctggatcctgttcgctggcaaaactcacattggcgttcagtaaaggttggatgggatgagtcaactgcaggtgagaggcagccaagagtatccttgtgggaaattgagccactaacaacattcccaatgtatccttctc

SEQ ID NO: 1455 - DNA, 372 bp, Eucalyptus grandis
gtcggtgttaggagattaatgagacagcaaagtaacatgccatcctctgttatatctagtcacagcatgcatcttggggttctggccactgcatctcatgccattgcaactggaactctcttttctgtattctacaaaccaagaacaagtaggtcagagttcattgtgagtctcaataaataccttgaagcacgggcccacaagctatccattggaatgaggtttaaaatgaaatttgagggtgaagaagtttcagaaagaaggttcagcggcacaatcattggtgtaggagacagcatgtcatctggatggactaattctgaatggagatccttaaaggtccaatgggacgaaccttcatcaatcatttgg

SEQ ID NO: 1456 - DNA, 436 bp, Eucalyptus grandis
gcaacgtagtgtttccatagcaactcaaacaacaaaggaacttgttttaaaggattatgctctggagtcagatgagacaagaatatacaaagcagcgcgaaaaatggttgccagccttgctggaagtctagctcatgtgacatgcaaggaacctttgcgtgcttcaatatcaaatcagctaaaaaattcgcttcagggcttgaatctatctgctgaacttctagaccaggctgttcaactggctaccaatgataatcttgaccttggctgtgcagtcattgaacgggctgcagctgataaggcaattcaaaccatcgatggtgaaatatctcaacaacttaacctaaagaaacatagggagggtgttgctccagcattttttgaagccactgtatttggtcaaggttcaatgggcattctcccagaggctcttcgc

SEQ ID NO: 1457 - DNA, 352 bp, Eucalyptus grandis
gcgcggcggaccgggggggagctggaaatgaagtgcccgtactgctcggcgtcgtcgcaggggcggtgcgccaccgccggcggcggccgctcgatcaccgagtgcacctcctgcggccgcgtcgtggaggagcgccaccacttcccctccctccccccccaagccctagccctcgccgacgccgacgccgaccccttcgagtccaccggcttcatcaccgccttctccacctggtccctcgagcactccccgctctccctccgctcctgcctctccttctccggccacctcgccgagctcgagcggaccctcgagtccaccaacccctcctcctcctcctcctcctcgtcga

SEQ ID NO: 1458 - DNA, 364 bp, Eucalyptus grandis
  misc_feature (52)..(52): n is a, c, g, or t
gagaaatttaagatcccggtggagttcaacggtttgccggagtttgccccanatgttactcgtgacatgcttgatgtcaggccgggggaagctctcgcagtgaacttcccactccagctacaccacacgccagacgagagtgttgacatcaccaatccaagggatgggctactaaggatggtgaaatcgctttctccgaaagtgatcacattgatcgagcaggagtcgaacacgaacactacaccgttcctgacaaggtttgtggagaccctcgactactacttggcaatgtttgagtccattgacgtgaccctgcccagagacaggaaggagaggataaacgtggagcagcactgtttggcaa

SEQ ID NO: 1459 - DNA, 224 bp, Eucalyptus grandis; identical to SEQ ID NO: 293

SEQ ID NO: 1460 - DNA, 363 bp, Eucalyptus grandis
gggaaaggccctcgaaaatgggttcggttcggcgtcaggcgagctcaggatccgatggcgacccgaggctcggtggggtggccgatgatgaaaggaagaggaagaggatggagtccaacagggaatccgccaggcgctcccggatgaggaggcagaagcagctgggggatttggtcggagaagtggggcaactgcagcaggctaacgctcagctcgcggtgagtatcaatgctgctgcgcagaagtatgccgaggtcgagttggcaaacaatgtcctcagggcccaggccatggagcttaccgagaggctccggtccctgaactcggtactcgagatcgtgaggtggtcagtgggctggtgat

SEQ ID NO: 1461 - DNA, 351 bp, Eucalyptus grandis
gtttgcccaaccatggtccactccctacttcaggagaaaatatcttaatgtctgagcttgcagagtgctgcaaggaattggaagaagggcaccgtgcttgggctgcacacaagaaggaagcggcatggaggttgaaacgactggagttgcagttggagtcggagaaggcgtgcaggaggagggagaaaatggaagagatagaggcgaaaatcaacactctcagggaagagcagaaagcttctttggataagattgaaacagaatacagagagcagctggcaggattgaggaaagatgcagaatccaaggagcagaagctggctgaacagtggacggcgaagcatgtcagct

SEQ ID NO: 1462 - DNA, 209 bp, Eucalyptus grandis; identical to SEQ ID NO: 292

SEQ ID NO: 1463 - DNA, 423 bp, Eucalyptus grandis
ctttggctttccttctccatctctctcgctctctctttgggattcgtgtgttctttcttcttttttgcaccacccgagattttccgaaagctgaagtggccggggagtgaagtttaagagagagagagccatcaccaaaagcccgaagatcatggggagaggaaagatcgagatcaagaggatcgagaacacgacgaaccgtcaggtcaccttctgcaagagaaggaacggactgttgaagaaggcctacgagctctccgtcctctgtgatgccgaagtggccctcatcgtcttctccagcagaggacgcctctacgagtactccaacaacagcataaggtcaactatagagaggtacaaaaaggctaattcagatagttcaaacacaagcactgtcacagagatcaatgcccagtattatca

SEQ ID NO: 1464 - DNA, 379 bp, Eucalyptus grandis; identical to SEQ ID NO: 98

SEQ ID NO: 1465 - DNA, 334 bp, Eucalyptus grandis
catcacacaggttgatttgagaactgaaatcaagatcgtcgtcgtcgtcgtcgttctcgtcggtgctgctcggccgcatttgactcggcgtaacgaacgaagccggttgcgatctagggttgttggggggcgcggaggaagctcgagcctcggtcgtttgttttctttttcttttttgccgatcatggaaggcgtcggcgtcgatcacctggccgatgagcggcagaaggcgcggttcgacgtggaggagatgaaggtcgtctgggccggctctagccacgccgtcgaggtctccgatcgcatggcccgctcgtcgccagcgatccggcctttc

SEQ ID NO: 1466 - DNA, 371 bp, Eucalyptus grandis
tctctctcttcgaaaaccctttctctctctctctctctcctctgtgattgcagatcaggctctcgcgccactccattcgcgcatctccgacctcctctctccacgcggccactgtcccgtcgcgcgaattcgccccgccgtcgtaggagaccgcatcctccgccgccgcggcgatggcggcgctggcccgagctccattccctacgctagcaacgcatttctttggaagtcaggccaggggaaggaatcaattactccctcgttactggcccaggataacagatcaagagctacaacagatccctggagactcaaactctgtaatcactccgctgtttgagaaaatgttgagtgctagtgatgcaggtaaa

SEQ ID NO: 1467 - DNA, 456 bp, Eucalyptus grandis
ggttgccgagttgtgtggagtgccatttgagttccacgctgccgccatgtgtggaagtcaggttgaacgagaggacctcagagtgcgacctggcgaagctatagccgtgaattttccctttgttttgcatcacatgccagatgaaagcgtcagtaccgataatcaccgcgatcggctgctgcgattggttaagagtctatccccaaaggtggtcaccctcgtggagcaagagtctaaaaccaacacgtccccattctatacaaggttcatagagactttggactattataccgcaatgtttgagtcaattgatgtagcgtgccgacgggatgacaagcaaaggatcagtgcggagcagcattgtgtcgccagggacatagtcaacatgatagcttgtgaggagacggaaagggttgaaaggcatgaacttttggggaaatggaggtcaaggtttag

SEQ ID NO: 1468 - DNA, 417 bp, Eucalyptus grandis; identical to SEQ ID NO: 326

SEQ ID NO: 1469 - DNA, 460 bp, Eucalyptus grandis; identical to SEQ ID NO: 100

SEQ ID NO: 1470 - DNA, 408 bp, Eucalyptus grandis
gaggaagccgtcgccgtcgagccgagtcaggaggtcttcgatcgcttcttcgccggcttgctcgttgattcccccgagggcggaccggccgaggcgaccgacggcgcgagcgacaaggagtccaattcatccgacggcggcggcggcggcggcggcgaacgggatgagaagctggtcgtcggagataacgagctttccgaggacgctgatgatgatgatcccgtctctaagaaacagagaaggcagctcaggaataaggatgcggcggctaggtcgagggagaggaagagaagttacgtgaaagagctggagatgaagagcaaatatatggaaggggaatgccgcaggctggggcggttgctccagtgctttgtggctgagaatcaactctgcgtctgaatttggaga

SEQ ID NO: 1471 - DNA, 530 bp, Eucalyptus grandis
gcagaatctgtagtatatatgacgatgaaagggaaatctatcactgcccttactgtaacttgtgtcgtgtgggaaagggattgggcattgactatttccattgcatgaactgcaatgcctgcatgtcgcgctccctttcagttcacaaatgcagacagaaatgcttagaagataactgtcctatttgccgtgagtacatttttacatcgaactctccagtaaaggccctcccctgtggccacttgatgcactcggcatgtttccaggagtatacttgtactcactatacttgtccgatttgtagcaagtcactaggggacatgcaggtttattttaaaatgttggatacacttttggccgaagagcaaatgccagatgagtattctggcaagacccaggttattctctgcaatgactgcgagaagagaggaagcacatcttttcattggttttatcacaagtgccgtcattgcggttcatataacacgaggctgctttgattccaacctaagacgcatatatataactct

SEQ ID NO: 1472 - DNA, 381 bp, Eucalyptus grandis; identical to SEQ ID NO: 102

SEQ ID NO: 1473 - DNA, 567 bp, Eucalyptus grandis
  misc_feature (430)..(430): n is a, c, g, or t
cacggcaacaaatggaagacaagacgctgttcttcctcactgagggatcccttctttatacctggtttcaggtagttcttccacctctctaagcaggacttggcatcacggttaaggggagtgttcatgcgctgagacacaaggtgccactcccttgggccatactgtttcacatatgcacgtaacaaggcgtcctcttcagctctccaacgctgtctttccttcattgccaggtgtagacaccacttcccattgcctcaaacttagatctttcatagtgtggctacagaagaagatggtgataatacaaattagaagtaatttctcacatcacaatataatacacgacattttagctgagttaactggtctgagaaaagaaaagaatcccaaggaggagacaggtttatccaaggaaatgcccggcttncatggcttctgcggtccatacgggatggccatcgacggtggtcatagcggaaatgctaacagtttcatggagaattgccagagattgaacatgctcgttccatacgatcagggccatgatcaggagcagatcaacgc

SEQ ID NO: 1474 - DNA, 423 bp, Eucalyptus grandis
tcccgctccattcacagatcagcggcacttcttgcgcagacaattgcagactctctctctcattcaggcgcctgtcttctcaagaattttgtcaaagaaactcctttgttttttctctctctctctctctctctcgaccatggcccgaccgcagcagcgatatcgcggcgtgcgccagaggcattggggctcctgggtctccgaaattcgccacccgttattgaaaacaagaatttggctagggacgtttgaaacggccgaggatgcggctcgagcctatgacgaggcggcaaggctaatgtgcgggccgagggctcggaccaacttcccttacaacccaaacatgtctcagtcttcttcgtcgaagctcctctcggcgacattgacagcaaagctccacaggtgctacatggcctcgttgca

SEQ ID NO: 1475 - DNA, 402 bp, Eucalyptus grandis
  misc_feature (240)..(240): n is a, c, g, or t
ccaatcttcactccccctatcccctctctctctctctcaagaactaagagcttactatggaaagcgaacgctacgatgagacgacagagaagcagcgaatcaggagaaggccgcaccagaagccgtacaggggtatccggatgaggaagtggggtaagtgggtggctgagatcagggagcccaacaagcgctcccgtatctggctcggctcctacgccaccgccgtggctgccgcccgcncctacgacaccgctgtgttctacctccgtggcccctctgcccgcctcaacttccccgacctcatcttgcacgagggccaggactcgctgggtgaggtctcagccgcctccatccgcaggcgtgcagctgaggtcggggcccaagtttgatgcttgtccaagc

SEQ ID NO: 1476 - DNA, 269 bp, Eucalyptus grandis
  misc_feature (90)..(90): n is a, c, g, or t
  misc_feature (120)..(120): n is a, c, g, or t
gaggagatggcgagggggaagatccagatcaagctgatagagaacacgacgaaccggcaggtgacctactcgaagcgacggaacgggctnttcaagaaggcgaacgagctcaccgtcctntgcgacgccaaggtctccatcatcatgatctccagcaccggcaagctccacgagtacatcaagctcctccacctcaacgaagaagatgtacgatcagtatcagcaggcgctcgaggttgatctctggagctctcactatgagaagatgc

SEQ ID NO: 1477 - DNA, 297 bp, Eucalyptus grandis
ggcaaccagtgtgagatgctcctgctgtcacactgtcaaccttgcaccagttacacctgcttccaatcaatatgctcatgtaaattgcggaaactgtcggacgatgctgatgtatccatctggagctccatctgtgaagtgtgcgatctgtcaatttattactaacgttggtgcgggcaatccaagggtttctgttccaccacaaagaatcgatggaccaccgtcagggacaacaccgtctacttcaacgtcaatgccccaatctactcaaactgtagtggttgaaaaccccatgtc

SEQ ID NO: 1478 - DNA, 408 bp, Eucalyptus grandis
ggctgtctctacaacttcaaatgcaattattggcctcagagacagtagacttgtcccgcagcttgttgaactctgccatgggttcatgtacatgtggaggtcaatgaatgaataccatgagattcagaacaacattgtgcagcaagtccggggccttgtgaaccgagcaaacaagggtgaatctacttctgaattgcatcggcaggcaactcgtgacctcgaatcagctgtttcttcatggcattccagtttctgccgcttaattaagttccagtgtgatttcatccgttcccttcacggctggttcaaactgactctccttcctgttgacaatgataacaatgggacccaggaacactctgatgcctatgccttctgcgatgagtggaagcttgcactaaacatgtc

SEQ ID NO: 1479 - DNA, 317 bp, Eucalyptus grandis
attatatcgtcgtgtctatttcccgaaatatttgcataactactagctgggtcctgtcgtaagccttacaataaatctactattagctgagtattgggtgtcgaataatttgcacgaagccacgaactattggcaatcgatctcatggcttcctcgagcggaacgtcttccgggtcaaccttgatccagaactcgggatcagaggagagtctgcaggccttgatggatcagaggaagaggaagaggatgatctccaaccgcgagtcggcgaggcggtcgcggatgaggaagcagaggcacctggacgatctgatgct

SEQ ID NO: 1480 - DNA, 411 bp, Eucalyptus grandis
  misc_feature (393)..(393): n is a, c, g, or t
tgtcattccattgaacactttgccatggaagtgcaagaagatgatgaccaggtttcaccagaaacggtgaaccccaaaacaccctctattgaggaagaatctgctaaaacgaaagcttctggcatcgatcaagaacagggcgattcgtcgaactcgcaggagaagccccccctgaagaagccggacaagatcataccttgcccgcgatgcaacagcatggacaccaagttctgctactacaacaactacaacgtcaatcagccccggcacttctgcaaggcctgccaaagatactggacggccggcggtaccatgcggaacgttcccgtgggagctgggcgccgcaagagcaagagctcagcttcgcattatcgccagatcactctctctgangctcttcaagcaagctcg

SEQ ID NO: 1481 - DNA, 401 bp, Eucalyptus grandis
gtccgtggagccatcgaacgtcccagagccacgggaaaattggctgcgcctgtaaactcgcccagcatgtcctcatcattggacctgaagaattcttgcatggatgcaaatgccaaccctgtgagcattttgcaacctggtgtagtgccacctgaagcctggttacagaatgaaagagaactgaaaagggagaggaggaaacagtcgaaccgtgaatctgctagaagatcaagactgaggaagcaggctgagactgaagaacttgccaaaaaggtggattctctgagtgccgagaatagggctcttaaatctgaaattagtcaactaaccgagaactcggataaattgaggctagaaaatgccacattgatggaaagactggaaaatgcacagggagtgga

SEQ ID NO: 1482 - DNA, 438 bp, Eucalyptus grandis; identical to SEQ ID NO: 286

SEQ ID NO: 1483 - DNA, 370 bp, Eucalyptus grandis
  misc_feature (291)..(291): n is a, c, g, or t
  misc_feature (333)..(333): n is a, c, g, or t
cagtcgggtttgccgttagatgataggcccgagggagctcgctccccttctccggaacctatatatgataatatggggattaggatcaatacgagagagtatcgtgctcgtgagcgtctgaacaaggagagacaggacattattacacagattattaagcggaatccagcgtttaagcccccggctgattataggcctcccaagctacagaagaagctgtacataccgatgaaagagtaccccggttacaattttattggacttataataggacctaggggcaatacccanaaaaggatggaacgtgaaactggtgcaaagatcgtcattcgnggaaaaggttcagtgaaagagggtaggttgcagcaga

SEQ ID NO: 1484 - DNA, 335 bp, Eucalyptus grandis
  misc_feature (212)..(212): n is a, c, g, or t
gaggaggagagcaggaagaagggcggcggcggtagcggcgagtcaaaccagggagggaaaggctcgaggtcggatcaggagagaaggaaggggattgcttggaccgaggaagaacacaggtggggtcttcttcttgtcaatcggttatttcttctaggcctagataaatatgggaaaggcgattggcgaagtatttcccggaactttgtcgncacaaggacgcctacgcaagttgcgagccatgcacagaagtattttatccgtctgagctctgttaacaaagataggaggcgatctagcattcatgatatcactaccgtaggcagtggagacct

SEQ ID NO: 1485 - DNA, 371 bp, Eucalyptus grandis
gtggttttgccgtcctcggggatggtgaaatcgagcggaggcgcgggggattctgatcattcagatcttgaagcgtccgtcgtgaaggaagctgatagtagcagagtcgttgagccggagaaaaggccgcgaaagcgaggtaggaaacctgccaatggccgagaggagccattgaatcatgttgaggccgagaggcagaggagggagaagcttaaccagcggttttacgcgctccgggccgtggttcctaatgtttccaagatggacaaagcgtcacttcttggcgatgcgatagcgtacatcaaggagctgaactcgaagctccagaccacggaatctgacaaggagaatctgcagaagcaaatggaatc

SEQ ID NO: 1486 - DNA, 373 bp, Eucalyptus grandis
accaccaccagtaccaccacctccctctctctctctctctctctctctccttttccctctgttcgtgttcggtacgattgcgaagcggaaagcgaatgctcctctccggattgccatgaactccaacgcttcctccaacccccagtcgatggccacctccacgacgtcggcgaccactccggcggcgggcggcgacggcggcaagaaggtcaggaagccctacacgatcaccaagtccagggagagctggaccgaggaggagcacgacaagttcctcgaggccctccagctgtttgaccgcgattggaagaaaattgaggattttgtgggctcaaagactgtcattcagatccgaagccatgcccagaaatac

SEQ ID NO: 1487 - DNA, 319 bp, Eucalyptus grandis
gagatggtagttaatacgagcctcggagagcagctcgacggatgatgatgatttgtacaagaaaccaagggaagaaacaataaaggcgaagatcacgagggtttattataggaccgaagggccaggcactagccttattgtgaaagatggacaccagtggaggaagtatggacaaaagatcaccagggacaacccttgtcccagagcttacttcaaatgcgctcacgctccaagctgccttgtcaagaagaaggtgcaaagaagtgctgaagaccaatcggtcatagttgcgacttatgaaggcgagcacaaccatcca

SEQ ID NO: 1488 - DNA, 384 bp, Eucalyptus grandis; identical to SEQ ID NO: 35

SEQ ID NO: 1489 - DNA, 411 bp, Eucalyptus grandis
aagagttgccgcctccggtggatcaactacttgcggcccgacctcaagaggggcgctttctccccacaagaggaggagctgatcatccacttgcattccatccttggcaacaggtggtcgcaaatcgcggctcggttgccgggacggactgacaacgaaataaagaacttttggaactcaaccataaagaagaggctcaagaactcgtcatcatcttcttgtagacactcgccaaacacgagcgattcctccttgtcatcagacgttaaagatgtcatgggaggtctcatctcccttcaggaacaaggactcatgccactttatatggactcgttgtcgtccgtgcaagctttggctcttaaccaggttatcgatccattactaccctcactcaaccaaaggcctcgacct

SEQ ID NO: 1490 - DNA, 396 bp, Eucalyptus grandis; identical to SEQ ID NO: 97

SEQ ID NO: 1491 - DNA, 188 bp, Eucalyptus grandis
tggatgttacttattgttcaattggatttgactccaggtaacccatggacggaggaagagcatcgaaggtttttaattggtctccagaaattgggtaaaggagactggcgagggatagctcgtgactttgtgactacaaggactcctactcaagtggcaagccatgcccagaagtattatatccggca

SEQ ID NO: 1492 - DNA, 461 bp, Eucalyptus grandis
caccggaaacagtccatgttcagaattattctccaattcatcaaatgggcattgatggattctttccagcgcatccctccccacagaatccttcgtaccattcttactcccccaacaatagacccaatttccctcctccgtcccctcaaacttcacagtgggactatttttggaaccccttttcatccctggactactatggataccccactcggagtagtattgatcatatggctatggatgatgagaccagaggattgaggcaggtccgagaggaagaggggattccagacttggaagaagaaactgagcacgaagaatgtgatcaccactcgtatgttgatgaagatagaggcaacagagatgctaatttccccactgaggaagttttagtggaagatgttgatgacaggaagaggatgaggatgaaggaacagacacagctgtgaatctgaggatga

SEQ ID NO: 1493 - DNA, 445 bp, Eucalyptus grandis
gtttcgaagaagggcgagccaataagcaatcggcatcatatacagaagatggtgagctttctgaaatgcttgataaggtattgctcggctgcggtttagggggtcaaatgtcggggtgcacacccgagaacatgagccaatccaagggcccacctggtccaaagggtggcagggttcgccgtaagaagggaaataagagcacagcagacttgaggagtcttctgattctctgcgcccaagctgtctctgctaatgacttcaggacagcttatgaactgctaaagcaaattagacaagattcttctgcctctggtgatggctctcaaagattggcgcattactttgccaatgggctggaagcacgccttgcaggcagtgccggtgatagacaaacctttttctattcttccgaattgcagaagaggacagtagctgataaagttga

SEQ ID NO: 1494 - DNA, 419 bp, Eucalyptus grandis
cggaaccggtggcaattggatcgctcttcctcgcaaagccgggcttaagcgctgcggcaagagttgcaggctaaggtggctgaattacctgaggccagacataaagcatggaggtttcactgaggaggaggatcacgtcatctgcactcttttctttaccataggaagcaggtggtcggtaattgcttccaaattgccaggaaggacagataatgatgtgaagaactactggaacaccaagctgaagaagaagctaatgaagcaactggcttctctgaaaacagtgcctgaaagtaactttgactatcaggtctgcgcacagaactcggcctcaatcgatcctgagaccaagaatcgggaatatgctgctaattcaatgggattccccaagcagaacttcaatccaggaatacccactt

SEQ ID NO: 1495 - DNA, 388 bp, Eucalyptus grandis
ccaatggtgacagtgttaaggatgaccttgatacagatgaatatgaaactcatgccacagttttggataagctattagcatgggagaaaaagctctacgaagaagtgaagcaaggtgagcacatgaagctagagtatcagaaaaaggtggctttgctaaacaagcagaagaaacgtggtgctagtggtgaatccctggagaaaacaaaagcagctgtaagtcatttgcatacgacatacatagttgacatgcagtccatggattcaactgcttcagaaataaaccacataagggacaaacagctgtacccaaagcttgcgcaacttgtcgatgggatggcgaatatgtgggaaaaaatgcgcatgcatcatgataagcaggagtctat

SEQ ID NO: 1496 - DNA, 417 bp, Eucalyptus grandis
  misc_feature (410)..(410): n is a, c, g, or t
ctccctcctcctccaaacgtttccgtttctctccaagctgaacatggacaagaagccagacgacgacagtggtaagtcccaagatgtcgaggtgagaaaagggccgtggacgatggaagaggatctcatcctcatcaactacatagcgaatcacggcgaaggcagttggaactccctagccaaagctgctggtctaaaacgtaccgggaagagttgtcggctccggtggctgaactatctgcgacccgacgtccggagaggcaacatcactactgaggagcagctcctgatcatggaactgcatgccaagtggggaaacaggtgagatgcacataagtcacacaacttttcgttacataggttctacaacataatacccatcgatcatattgaaacaaggtccccgtggnatcacga

SEQ ID NO: 1497 - DNA, 404 bp, Eucalyptus grandis
catggacatgctgaagaggacaagaagctcatcaacttcatcctcacccatggccaatgctgttggcgggctgttcccaagcttgctggactgctgcggtgtggaaagagttgcaggctgaggtggaccaattacctgaggccagacttgaagagaggccttttgtccgagtatgaagagaaaatggtcattgacctccatgcgcaacttggcaacagatggtcgaaaatagcctctcacctcccgggaagaacagacaatgagatcaagaatcactggaacactcacatcaagaagaagctcaagaagatgggcattgatcctctcactcacaagccattagtcaccaacaacgacaacacaaccgatcaacaacccccccaagcagcccagacccatcccca

SEQ ID NO: 1498 - DNA, 340 bp, Eucalyptus grandis
gtcagaggcaatcccaatccaaggagttactacaagtgcacaaatgctggatgccctgtgaggaagcatgtggagagggcctctcatgatccaaaagctgttattactacttatgagggaaaacacaatcatgatgttcccactgcaaaatctagcagccatgacactgcagctccctccgctctaagtggactgccaagaacaagatcagaaggtgaaacagtgagcctagatcttggtgtgggaagaagtgcggcatcagaaatggcgtcagctgagaagcagcagatcctccggccaaaccctgtccaaagtcgaatccactatgccagttccgctt

SEQ ID NO: 1499 - DNA, 311 bp, Eucalyptus grandis; identical to SEQ ID NO: 281

SEQ ID NO: 1500 - DNA, 324 bp, Eucalyptus grandis
gttgaatggggattcaaacaatggcttcacaaggcggcggcggcagcagcggtaatgccagaggtggcggtggcaataatggaaaatccactgaagttcagccattgactcggcagaattcaatatacagtctcactcttgatgaggttcaaaaccagttaggtgatttagggaagccattgagcagcatgaacctggacgagcttttgaagaatgtctggacagctgaggccggtcagtcaatgtttatggatgttgagggcacggctgtggctaatcaaaatgctctcccccgtcagggaagcgtttcattaactggtgcat

SEQ ID NO: 1501 - DNA, 380 bp, Eucalyptus grandis
ctctctccctctccctctccctctccctctccttctccctccctctcttcgatgacacggggctagataagtttagggtttcttgagttcttgctctctctctctctctccctgtagagattttttattggagctttttttttttttttggttcctggtgttcttgtcgttggtcatagcaagaaaagagagatggggagagggagggttcagctgaagaggatcgagaacaagatcagtaggcaagtgactttctcgaagcgacggactgggttgctcaagaaagcccacgagatctccgttttgtgcgacgccgacgtcgctctcatcgtcttctccaccaagggaagcttttcgagttttcgactgactcttgcatg

SEQ ID NO: 1502 - DNA, 347 bp, Eucalyptus grandis
gaactacctctgagagtcgacgactcagaggatatgttggtatatggcgctttgtgcgatgcactcagttctgggtgggcgacgccttcggcttcgaatcaagaacttgatttcgaaacgaggactgttgataacgacggcattggtctggagctgcagacgagaccggagatggtgaagcgcgagatgagagcgccagtcaggacggtgcattacagaggagtgaggaggcggccatggggaaaatatgcagcagagataagagaccccaagaagaacggcgcgaggatttggctcgggacttacgagctgcctgaggacgcggcattggcctatgaccggccgct

SEQ ID NO: 1503 - DNA, 312 bp, Eucalyptus grandis
  misc_feature (133)..(133): n is a, c, g, or t
ggtttgctcagatgcagcaagagctgcaggctcagatggactaattacctccgtcccggtatcaagcgcggtagcttcacggaccaagaggaaaagatgatcgtccaccttcaggctcttcttggtaataggngggcggccatagcttcgtaccttcctcagaggactgacaatgatatcaagaactactggaatacccatttgaagaagaagctgaagaagcttcaaggccaagcaaatcctgatgatgatgaccataatcatcacccacaagggttcaacgcaacttcacactccaaccccaagggccag

SEQ ID NO: 1504 - DNA, 468 bp, Eucalyptus grandis
agcacggtctcatgagcactcgcaattagaaattaatcctccatcagaagcatcaaaagagccactcccagatgaaccatctcttatgccaaatgaggattcacatcagctctctccatcagaagctaccacttccatggccgaatcctctgatttcgttagttccagtcacaaatgggaagctcttcccatggttctagagaagcccactgaagatgggtataattggaggaagtatggccagaagcaggtcaagggctgtggttttcccaggagctactataaatgtagccatctcaattgctcagtcaagaaaaaggttgagcattctcttgatggtcgtataacggaaattacttacagagggcaacaccagcatgaaatgcctcaagccaaaaggacttcaaaagatggtaacaacttgaacaggagcacaaattctctggctaaatctcaagctgttcttca

SEQ ID NO: 1505 - DNA, 415 bp, Eucalyptus grandis
caagctacaatggtgattcatatcacttgatatttaagaattgcaaccacttctgcaaggatgtttgttacaagctgacagggaaaccgattccaaagtgggtcaatcgacttgcgacaataggttctgcctgcgactgcttccttcctgaaacccttaagatcactgcagtacgtcatgaacctaactgccaaccatgcgaaagtgagaagcggaggttaacaaacaacttcagttgcctgtcttctatatcaatgaggcagaagcagttatctacatcctcattattccttcgttctcccctgagaggctgtctaccgccttgggaactcaaaaggtctaacaatggctccttgaaggaaagatgagaaaatgcccagagtgaaactacatcacaagcgatcatggagcgctg

SEQ ID NO: 1506 - DNA, 512 bp, Eucalyptus grandis
  misc_feature (287)..(287): n is a, c, g, or t
  misc_feature (446)..(446): n is a, c, g, or t
  misc_feature (462)..(463): n is a, c, g, or t
ctctattccactcctaattcatgcttttcgtgacaataattttgtagcatgctcaaaactctagagagatatcagaagtgcaactatggagccctggagccgaacgtgtccgcgagagaatccttggagttaagctgtcagcaggaatatttgagacttaaggcacgttacgaagccctacagcgaactcaaaggtattgaagtttctattgtccttttaattaaatgtcagcattcgcgggatgtagttattttcctacatgattggggtctatctgtgtcatcgngaactaggaatcttctgggagaagaacttggccagttaagcagcaaagaactcgagtccttggaaagacagctagatgggtcattgaagcagatcagatcacgaagagtatgtaaattatattcacgaattctatctaagtcacatcctgagttattgngaatacaagttactgnngtcaatcgctgggattagtggtcatcggtctggctaactttagtagcga

SEQ ID NO: 1507 - DNA, 342 bp, Eucalyptus grandis
tctagaacaagatcaacaggcaagtgacgttcgcgaagaggaggaatgggctcctcaagaaagcctacgagctctccgtgctttgcgacgcggaggtcgctctaatcatcttctcccatagaggaaagctgtacgagttctgcagcagctcaagcatgctcaaaaccttggaaaggtatcaaaaatgcaactatggagcaccggagcctagcatctctacccgggaagcacaactggagctaagcagtcagcaggaatatctgaaacttaaggcacgctatgaagccctacagcgaacgcaaaggaatcttcttggggaagaattaggccctctgagcagca

SEQ ID NO: 1508 - DNA, 413 bp, Eucalyptus grandis
atgacctcgaactaaaagtgcgagaactggaaactgtcatgctaggacccagctcagatatgccccacacggttgatatcaacttcttggttggatctggccagatgtctcaggagacggagacattgatggagattatctccaggagggacctaaaggagattctctgtgcttgtgctaaagcagttgaagacaacgacaccttaaaatttgagtgtttaatatcagagttacgcccgatggtgtctgtttccggtgacccgatccaacgattatcagcatacatgttggaagggctcatagcaagattggcaagttcgggaagctctatttacaaagctttaaagtgcaaagagcctgctggtgcagagctgctatcgaacatgcacattctctatgatatatgtccttat

SEQ ID NO: 1509 - DNA, 296 bp, Eucalyptus grandis
attgaatgaaccgggcatttcgggtgaaggaatacaagaagcccgcgccgtgcaaaattcaacagattcggagattgtaggtgatggatttcggtggaggaagtatgggcaaaaggttgtgaaaggaaacccgtatcccagctactatagatgcaccagtgtcaagtgcaatgtgcggaagcacgtcgaaagagcttcagaagatccgagagcctttataacaacatatgagggaaaacataaccatgagatgccactaagaagtaccacacagcaggctcagagtccgatctgca

SEQ ID NO: 1510 - DNA, 441 bp, Eucalyptus grandis
attccttcttctctctcttcgaaaaccctttctctctcttcgatctctctctctttctctctcctctgtgattgcagatcaggctcccacgccgttccattcgcgcatctccgacctcctctctccacgcggccactgtcccgtcgcgcgaattcaccccgccgtcgtaggagaccgcatcctacgccgccgcggcgatggcggcgccacgaggagatgccaggggaaggaatcaattacttcctcgttactggcccaggataacagatcaagagctacaacaaatctctggagactcaaactctgtaatcactcctctgtttgagaaaatgttgagtgctagtgatgcaggtaaaattggacgtttagtgctgccaagaaaatgtgccgaggctattttccggctatttcccagcctgaaaggatttgccgtcaaagttc

SEQ ID NO: 1511 - DNA, 315 bp, Eucalyptus grandis
  misc_feature (275)..(275): n is a, c, g, or t
tgatgggaaactctcatgttcttccaatctgaagagcttcttcacaacagctgcgtcacgaggtgatttccagattcaatggtccgagttcgccggacgcggcggcgctgccggtagcatctaaaagcattgacctggaaagaaataggaggaagaagctcaatgaaaggctcttcgcactcagagcccttgtacccaagataagcaagatggataaggcttcgatagtgaaagatgctattgattacatccaagacttgcgtgaacaagaaggnaagatccgagccgagatcgcagagctcgaatctgtaattc

SEQ ID NO: 1512 - DNA, 409 bp, Eucalyptus grandis
gagagacagaagaattagaacgacacgaacaggcaagtgacctactcgaagcggaggaatggcatcttcaagaaagcccacgagctcaccgtcctctgcgacgctagggtttccatcctcatgctctccggcaacaagaagctccacgagtacatcagccccaccaccacgacaaaaaggatgattgatgattaccagaaggctcttgggatcgatctgtggactacacactacgatagaatgcaagaggagttgaggaaactgaaggaggttaataacaattttcggaaggaaataaggcagatattgggccacgatttgaacgagctgagctacgcagaactgcacagtctccgagcagacgatccgagtcttctgtcaattcaagtgcgggaaagaaagtaccatg

SEQ ID NO: 1513 - DNA, 323 bp, Eucalyptus grandis
ggagagagttgagaggcctgagacatataagcagtggcaaatccgcaacacgagggcgggttttaagcccctccccctggatcccgtaattatgaagaagctgaagtcgaaattgaaagaggggtaccttgatgatttcgtggttgacaaagatggtcaatggatgctccaaggatggaaaggtcggattctttatgcttcctcctgttgggaacctgtgtagaatttctccaagtctttatatgcttgtccttttggtgtgagccggggatagtttatgacgaccaaggaggaagctgttggctgattcgtggcaagtaagg

SEQ ID NO: 1514 - DNA, 285 bp, Eucalyptus grandis
  misc_feature (10)..(10): n is a, c, g, or t
  misc_feature (24)..(24): n is a, c, g, or t
gtaatggaangccacgaggagatnccaggggaaggaatcaattacttcctcgttactggcccaggataacagatcaagagctacaacaaatctcaggagactcgaactctgtaatcactcctctgtttgagaaaatgttgagtgctagtgatgcaggtaaaattggacgtttagtgctgccaagaaaatgtgccgaggcctattttccgtctatttctcagcttgaaggattgccactcaaagttcaggatgccaaaggcttcggagtggatatttcaatttcgt

SEQ ID NO: 1515 - DNA, 290 bp, Eucalyptus grandis
aaaacactagtggaggcccagaattcggacacgaggttcagttagtggtgatataagttggcaaggcactgacaaacatggactccctagggatgccttcttgcttcccggaatgtcggccccagagaggaaaagagcacgcaacattgggtccaaaagtaaaaggctgttgattgacagtcaagatgctcttgagctgaaaatgacatgggaagaactccaggatttgcttcggccaccgagtgttaacccaagcattgttacagttgaagaccatgagtttgaagagt

SEQ ID NO: 1516 - DNA, 357 bp, Eucalyptus grandis
  misc_feature (38)..(38): n is a, c, g, or t
gttcagttagtggtgatataagttggcaaggcactganaaacatggactccctagggatgccttcttgcttcccggaatgtcggccccagagaggaaaagagcacgcaacattgggtccaaaagtaaaaggctgttgattgacagtcaagatgctcttgagctgaaaatgacatgggaagaactccaggatttgcttcggccaccgagtgttaacccaagcattgttacagttgaagaccatgagtttgaagagtatgatgaacctccggtttttggaaaaagcagtatttttatacttcgctccactgggggacaagagcaatgggttcaatgtgatagctgtggtaaatggagaa

SEQ ID NO: 1517 - DNA, 416 bp, Eucalyptus grandis
caagattcttctcccctttcgttccttcgagggtccaaaacttctctctttctctctctgtgtgcggctggaagagagatcttggaggctgtgaatcttggtttctttctcttttggttgacgggtcacataacacgaatctagggttcttgatctttggtgggtgtctttcgaattcgaaggaagaaaagccaagaaacaagaaaatgggtgtggagaccacctccggatcgggctcggaatgcgagacgcgtgtgatgctgaacgtctacgatctcacgcccattaacaattacacccgctggttcggcttcggcatcttccattcgggcattgaagttcatggcaaagagtatgggtttggtgcccatgacttccctgttagtggggtttttgaagtggaaccaaagagctgc

SEQ ID NO: 1518 - DNA, 218 bp, Eucalyptus grandis
attcgaccagtgtcggtaccaaaaccaccacggctctccccatctcctccggccgaaagccctctcaatgaagcgggtgggagtccctccgaaacccaacaagctttacaggggagtgaggcagaggcactgggggaaatgggtggctgagatcagacttcccaagaacaggacacgcctctggctcggcactttcgacaccgccgaggaggctgctc

SEQ ID NO: 1519 - DNA, 337 bp, Eucalyptus grandis
  misc_feature (29)..(29): n is a, c, g, or t
ctcaaaccagaagggccttcctctgcggnttcaagatgtaaagggaaaggaagtgggtgtttcagttcagattttggcccaataataacagcagaatgtacgtgttggagggtgtaactccttgcatacaatctatgcagttacaagctggagacactgtaacttttagccgcatggaccctgaagcgaaacttataatgggtttccggaaagcatcaacctctatgatgcaggacagccaactagctgctgtttctaacggtaaccattcaagtgaagctttgatttctggtggttttgaaaatgtacctatgataagtgggtattcgagtctcct

SEQ ID NO: 1520 - DNA, 439 bp, Eucalyptus grandis
gagcgcttggcggcctctgataggagaccggccaactgcttcgaatgatgcaagtgatggaccggtaacaggacttgcactgtcaaagtgccgcacgctcatcggtctgccagaaactcacggagagagagagatggcggagagagaggagaaggggaagtacgacgagatgatgatgaagaaggggagcgacggagggatagcggaggtgaatcccacgccgaagaagggggtgacgtccaaggttgtggactacattgagaagctgatcgtgaagttcatgtacgactcctctctgcctcaccaatacctcgccggcaacttcgctcccgtcgccgacgagacccctcccgtcaccgacctccccgtcgtcggccatctccctgattgcttgaatggagaattcgtccgggtgggccccaatcccaagtttgccccg

SEQ ID NO: 1521 - DNA, 448 bp, Eucalyptus grandis
attggattctaccggaaatttgcgcgccgttgggggttttttgatgtcggaggatggggtcgtcgcagaagtgcatgaatgtgctgtgcgaggagaaggggtcgaccgagtggaagagaggttggcccctccgatctggtcaactcgccaccctctgcgataagtgcgggtctgcatttgaacaggccacgttttgcgaagttttccactcgaaggactctggatggagggagtgcgcttcctgtggcaagcgcctgcattgcggatgcattgcttcgaggatgctgctggagctgctcgattgtggcgggatcaactgcgcgacctgtgcgaaaagttcaggacttctgcctatcgcaagtgatgagaggcctagtgagtttggcatgattaatgttcgtactggtgaactgcaatctagtaccacagacaaccatttcgatagcga

SEQ ID NO: 1522 - DNA, 439 bp, Eucalyptus grandis
cacaacacccccatatcagtaaacacttctcgctgctccagccagcttctgtctcatataaacactagccccacctcactcattatccgcttcgctcctactcaactgctatcgcgctatcccagcgcagacgtcctcccatgaacttctccgacaaggaagtgcagctcgcgtccgaccacccgaagaagcccgccgggagaaagaagttccgggagacccgccaccccgtgtaccgcggggtgcgtctgcgcgactcgggcaagtgggtctgcgaggttcgcgagcccaaaaagaagtcgaggatctggctcggcaccttccctactgtggagatggcagcgagggcgcatgacgtggcagcgctcgcgctgagaggccagtctgcctgcctcaacttcgcagactctgcgtggcggctgcccaagccggcatcgac

SEQ ID NO: 1523 - DNA, 361 bp, Eucalyptus grandis
gcctggtgaacgaagttttcgagagtggccaactttcccatcgcaatagccatttggcccatgtattctgcgacgttgcctgaaccagtaggactcagtgtggtcgaagaaagcgtgtccacgagagattgctgcagagcttccattccctgagataaagcatcttcagcctgttgtgaagattgctgcagattacatatgcccatcaactgttgatccgtcaaaggctccaggtggttccctagtatcttgagaagttcagatgaacggaaaccgcccaaccacatgaaacacctctcggcgggcgtcttccacatgccagagagtatgtggaacacatcggccttcgcacctatgttct

SEQ ID NO: 1524 - DNA, 422 bp, Eucalyptus grandis
ccgactcagcaaagccaaagaaagaaaccagaaacagcagaccagaccattccattccattccatttcgcattctctactacagactcgcagagatggtgaagagagacagagaggacgcggaggtcgaagccctggccgtggccaactgcttgatgctcctcccccgagtcggcgagtgcgccgactcgaaccgcgaatcgcggtctacagagcggatgttcgcgtgcaagacgtgcaaccgcgagttctcctcattccaggcgctcggagggcatagaaccagccacaagaagcagaagctgatccccggcggcctcttccacctcggctgcaccgcggattcctcgccagccaagccgaagaggcacgagtgctcgatatgcggcctcgagttcccgatgggccaagcccttggcggtc

SEQ ID NO: 1525 - DNA, 443 bp, Eucalyptus grandis
ctcgatgatcgacacttgcacgctagtctcggatggcgtgggctggagaggaggtggcggcgactccacggccttgggcttggccccgctgccgccctcgacgatcctcattttcctcttgtcagacccagacccgggcaagcttgctcgggaggaccgttctactgacgaggccgcgcttcgtagatccttcaaactagtcgtcctctgcaactctccttgttttgtcctgtggtcagcctccatttgtcgattcctcgcctcgagatcttggatcttcttcctaagttgcttcacatattctatggtatcccccaatatggaggccttatccattttggtcacgaacggcaccagtgacctcagtataatgaacctctcgttgagcttctcgcggcggcggcgctccgccaggacatggttggcgctgagctcgtcctgcg

SEQ ID NO: 1526 - DNA, 379 bp, Eucalyptus grandis
gtcctccacagttgcggcagattgtaaaagttcccacgcactcgttgctcatatgacccacctgctgacagttcctacacacgacatccctgaaaccgccaccgccaccgccgccaccgccgccaccgccgctgcgcccaacaccaccacctcgctctcccatgacattgcctttaggacactgcctagccacgtgcccagatatgttgcacatattgcagactggctcattcgggcaatcacgtgccaggtggccagttttcctacagttgttgcatgccttctcattcgtacagtcagctgcaatgtgcccttgcttgtagcagttgttgcatagcctcaagtcaccaggaggagcgctgcattctctagcaatatg

SEQ ID NO: 1527 - DNA, 419 bp, Eucalyptus grandis
gttacattgattgacatgtgaacccgtcttttctttttttttcagtagtggcaatccaccaaggcgggcgaggctagtatgatgggctgttgacttgtggcgaattggaacttcgagttctcccggcggcggtgcgcttggtggtggtgatcctcctccgtcggggccggcaggttcaggtccaaggagaggatgttgcgggacttctcggtggtgatggccgcagcagccggcgggttggtggggctcgtcgcgtcggcgctggtggccgtcggcggcggggcggacctgtgccgcctcatgtggccgcccaaggcctgacccgacgcgaactcggacccacatatgttgcactcgtggatcttgggcttgctcgcttgatggagccccttgtggctggccacgtgggcggagagggg

SEQ ID NO: 1528 - DNA, 381 bp, Eucalyptus grandis
cttgcctcacgattgaagaagaaaagagcagcagaagaagcgtttccgttgctatggtcattattttgagcaatcgcagaacgggcaactgagcggttcatcttttcggtggccctataaacaactcggtctcaacatccatagactccgcgcggatttcttcacgaggcggttcgctggagaccggggtcaatcctttgccgcattcaatctcttgaagtagctttctcttttcttccagtagtttccgctcctctgcttttagccgctcaatatgctccctaattaaatggttctttcttgccctgatcttggttagacttctttccaactggttttctgtttgttggagctcctcgaccgaacaggaatccagaccct

SEQ ID NO: 1529 - DNA, 524 bp, Eucalyptus grandis
ctctcagcataatctctctctctctctctctctctctctctctcctgcgctctgcgcaggagcttattcttttattcttttcttcttcttcttttctgttgggtagatttgtaaattagtagggcgaaatccggaccttcttcttcttgctcccctttcttcctgcagctcgaatcgtatcgtttcgtccgtccgtccatccgatcgacatggccgcagtcttccagctcgacggcgaccgcgctgccgacgccctccccgattcgccggttgtcgatcaggagaaaatgccgatcgcgacgagccatgattatgctaatcatgggggggtttgtgcgatatgcttggagaagattgtgctccaagaaactgccctcgtaaaaggttgcgagcacgcctactgtgtgatatgcattctccgctgggcctcatgtaaggagagaccaacctgccctcagtgtaaacatcctttcgacttcctcaacgttcatcgctcgctcgatggcagcatccgtgatacatgt

SEQ ID NO: 1530 - DNA, 185 bp, Eucalyptus grandis
  misc_feature (87)..(87): n is a, c, g, or t
gaactggctgtctgggatcaacatagggaagcgagtgcacatgtttatcaaaaggacccagaggtccagatgtagtcctaacagatnggctgtcaatactagcacaggggatttcaccagacatcggctgcccattggttagaagagggattggatgtcgagattcatgtctagaagaagaagaa

SEQ ID NO: 1531 - DNA, 385 bp, Eucalyptus grandis
tcagctagccgctccacccgcttcttcacccggcagttgtcctgcgtgcagcggtagtagcttctgggatgttgagtgttcttgaccaccttctgaccgtacttcctccatttgtacccatcgtccaggacatccacatcgctcatggtcttgaagcaaaacctcggctccctcaccttcctcctcccctttatcttcttcatcttcaaggctgaaacccccatgctctggtggtggtggtgatcacgataatgatcgccatgatctccaccgccggatgaggatctcatgaccaagctgctctggtcactcaactcaccccatgcccagagattcggggttgatctttgcaaagacagaagctgggggcctcccaagagttcag

SEQ ID NO: 1532 - DNA, 153 bp, Eucalyptus grandis
tcggggtcaatccatctggtgcagaacataaacgcctgctttggtcccaggcattttctgcacaggtccacctaggaggaagaagaacatctactggtaaccttctccatttaccacagctatcacattgaacccattgctcttgttcccccc

SEQ ID NO: 1533 - DNA, 417 bp, Eucalyptus grandis
cagaaagtgactcgccctagtgtaggagtagggagaggcttggatgcacattccatttcgcctccttgaagccctccaacggcgcagatatttccttgcttttttaggcaaaatgttgaaaaactggtgataataaaaagaagccctgtttagctataaagggaagccccatcctttctcctccctttctctttcttacctgtccccccctcccctctcctggctctcgctctctctctctctctcagttctttctcggacgggtgtctgtgcgtggcttttgatcggtcatcacctgaggccgcgtctgcaagcaagtgaagaaggaggacaaggaatatggcgagagagaagatcaagatcaagaagatagacaatgtgacggcgaggcaggtgacgtttctaagaaggagacga

SEQ ID NO: 1534 - DNA, 574 bp, Eucalyptus grandis
gtccttgtgacgacaaagttccgggaaatacttcgccaatcgcctttcccatatttatctaggcctagaagaaataacctgtgttcttcctcggtccaagcaatccccttccttctctcctgatccgacctcgagcctttccctccctggtttgactcgccgctaccgccgccgcccttcttcctgctctcctcctcccctaagttactggcggagccatccgagcaagccgaactgtaggacggcagaggcacgcggccagcctctatcctattgacatcttccaccaggtcctcgtagtggagcttaatctcctctagggttttgccgggcacgtcggacgctaccttctcccaccaatccggggaaacctcgaagtgggtagccagggcattctcgaacgccttgtcctgttccttactccacgaggaacaactagggctcactgcttcatcgacagtcatcaaagcaaaacccacacacccttccaactccgaacgacttcacgcgactcagcagcgcgaccaaatgaaactcgacggcaaaatctacggagctatcgaaccaaccccaa

SEQ ID NO: 1535 - DNA, 497 bp, Eucalyptus grandis
  misc_feature (424)..(424): n is a, c, g, or t
accgacctcctctctccacgcggccactgtcccgtcgcgcgaattcgccccgccgtcgtaggagaccgcatcctccgccgccgcggcgatggccccagcttcattccctgcgctagcaacgcatttcaatggaagtatgctcaatgatactaactcatctggtgaaagtcacacacgtaatggaaggccacgaggagatgccaggggaaggaatcaattacttcctcgttactggcccaggataacagatcaagagctacaacaaatctcaggagactcgaactctgtaatcactcctctgtttgagaaaatgttgagtgctagtgatgcaggtaaaattggacgtttagtgctgccaagaaaatgtgccgaggcctattttccgtctatttctcagcttgaaggattgccactcaaagttcangatgccaaaggctcggagtggatattcaatttcgattctggccaataataatagtagaatgtatgttctggaa

SEQ ID NO: 1536 - DNA, 454 bp, Eucalyptus grandis
gttcttcctcgtctccatgacgcatccttcggcaacgacggcagcttgcccggccaggccctgtacgggtcgaccccgctttgggtgtcgggcggggaccgcctcgccgactgcggctgcgagagggcgaacaggcgcggattttcgggctcaacaccatggtctgcgtccccgtgatcggcggggtcgtcgaattgggctccacggagccgatctaccatagcccagatctgctgaacaaggtcaggaatttgttcaatttcactggtgggatggaattagggtttggtgggaatggtaacgatcagggcgagagcgatcctttcttcgctctggctcaatgatccggcgggcacggtcgaggtcaaagacagcgccgtcgccgggcggccgccgtcaagggttcttcgaattataacggtagcaatcatgggtctaaatcgattcaactcga

SEQ ID NO: 1537 - DNA, 266 bp, Eucalyptus grandis; identical to SEQ ID NO: 435

SEQ ID NO: 1538 - DNA, 426 bp, Pinus radiata
gcatattctatatgaagtttgtccttatttcaaatttggttatgtagctgcaaatggtgccatcgcggaagcatttaaagacaaagacagggtgcacattattgattttcagatcgctcaaggtagccagtgggtaacattaattcaagcatttgcagcaagacaaggtggttcgcctcatgttcgcatcacaggtgtggatgatcctcaatcagagtatgctcgaggtcaaggattaaatttagttggcgaaagattatcaaagcttgcagaaagctaccaagttcctttcgaatttcatggtttgtctgtttttgggtctgacgttcatgctgagatgcttaagattcggcctggggaagctttggctgtaaattttcctttgcagctccatcatatgcctgatgagagtgtgaatacaagtaa

SEQ ID NO: 1539 - DNA, 447 bp, Pinus radiata
cgacggcgtggtttttacacagtcttcggactcttcttgctcggagtcttcccaaccacggccggcaaagaaatacaaaaaaacccatagcaagaaagcccaagacggctctcagccacgaaggtgcagccattgtcttgtacagaagactcctcagtggagagccggacccttgggaccgaagacgctctgtaatgcttgtggtgttaggttcaaatccggcagactcgtaccagagtaccgcccggcaataagccccactttttttgagcgaggttcactccaatagccacagaaaaatcctcgaaatgagacgccaaaaagaagaagaacaacagaggccagagctaacgtcccagacgtgttcaagcggcgccaacgagtcattttcagacaattctttaccgtctgaagagtcccttctagtttaacccacaggcgtgaaat

SEQ ID NO: 1540 - DNA, 382 bp, Pinus radiata
  misc_feature (285)..(286): n is a, c, g, or t
gaggaaatgggtgtcggaagttcgaattcccaattccagtggcagaatttggttgggctcctacgacaccccggaaaaagctgcccgtgcatatgactttgccgtgtattgcctcagagggtccaaggccaagttcaattttccccactctccgccgaaattttcctgcgcttcatttctatcaccgcagcaaattcaaaccgcggcggccaagttcgccgcagaagaattccggcttctttccgaaaatggcgcggcatcctcatcatatggtttggaaaaggnntatgacattaatagcgaacagattacttggaagcagggtgcgacatttggggattcagtagcatttgaaagtatggagaatggcggatctttcaac

SEQ ID NO: 1541 - DNA, 368 bp, Pinus radiata
  misc_feature (331)..(331): n is a, c, g, or t
ggtgattggagagggaatagcacggaattttgtcataacacgaacacctacaccaggtagccagccatgccccagaaatattttattcgacagagcaatatgactagaaagaagagacgttccagtctgtttgacatgacgccggtgagttttttcttcctgtcttaaattcttggtgtggtgggcatggaagggattcaggaggcgtcttgggcaaagatcccaaaaattggatttgcaatcaatcatgattcataattgttctgaaaattatgctaagaactaatctcatctttcaaacctcaaatggtattcttttgtttgaagttgnttctaagtttctttaatgtctattcataatttcattt

SEQ ID NO: 1542 - DNA, 370 bp, Pinus radiata
caagcctagagtatgatttggcctaccaggccttctatcagcttcttccttatcacaaattcttgcacttcacaagcaaccaggcaatacaagaagcggtggacaatgcttctaatattcatatcattgacctcgagatcagacaaggccttcagtggcccagcttcatacaatcgctagcccacaggcctggaggacctccgaagctgctcaagatcacagcgataggacaagacgagaagaggctcaaacagacaggtaggcgtttgcttgagtttgcagaatcaatggagattgcatttgcttttcacccggttgttgtggacttggagaacctggatgaatcggccctcaatataaaagcccacga

SEQ ID NO: 1543 - DNA, 404 bp, Pinus radiata
gcggagtatgttcaaagcgggtggtgatttagccgagggcgaagaggaggacgaagaagggcttcgtaacaaacgtggcgattgatcctaccttagcctgaaaatgctgtcaggaggctacgcaaccagatccgacactactactgtcaacaacggatccgctaatggcccaataggaagtgctcccccaagaattaactcgatacaaaataataatccaggagctgtcaggcctggctggggaaccatgccccttcacatgaatccttatcatccccaatcaatgcctcttccgccccccaatggtatgcagggtcagcttgtgtgcagtggatgtagaactcttcttgtttatccgcaaggtgcaccaaatgtttgctgtgcagtatgcaacacagtcactc

SEQ ID NO: 1544 - DNA, 339 bp, Pinus radiata
tatgtctctgcatttcagccagtccatggtttcaagttagttagtccaataaagcagagatgggtcgtgctccatgctgcacaaaagttggtctcaacaagggagcatggtctgccgaagaggatagtcttctgggaagatatattcaaactcatggtgaaggcaattggaggtctctgcccaagaaagcagggctgcgaagatgtggaaagagctgcagattgcgttggctaaactatcttcggccatgtatcaagcggggaaatattacaacagatgaagaagaacttattatcagaatgcatgctctcttgggcaaccgatggtcgataatagcag

SEQ ID NO: 1545 - DNA, 395 bp, Pinus radiata; identical to SEQ ID NO: 508

SEQ ID NO: 1546 - DNA, 390 bp, Pinus radiata
gttctgtcaagacccagcaagaattttgttccgggtttgaaggtgggagaagtgaggtgattcctcctttggaagatgtggaagggtccacacccacgattggggggaggaagagaaaaaatgtttacagaggtatcagacagcgtccatggggaaaatgggctgcggagattcgagatcccagtaagggggttagggtttggcttggaacgttcaacacggcagaggaggccgccaaggcctatgatgcagcggctaaaaggatccgaggtaagaaagctaagctaaattttgctgataactcgtgttctgttaaaaatgacactagcaagaaattgtcaggaaaagaaaggaaagttgtgctcaaaacaccctgcttttgttgttaga

SEQ ID NO: 1547 - DNA, 447 bp, Pinus radiata; identical to SEQ ID NO: 548

SEQ ID NO: 1548 - DNA, 357 bp, Pinus radiata
cagaaatcttgtgatccttgtgattataatcaaaggtcagccttgcaagcaaccgtgaagctgtgttcagttcagagcttctcttgcccgatggattcggagcttatgatggatgccatgcggaacctttcgaataatggattcgctacttcttccatggaaatgttagcggttatgccggatcagattactgtcgaagcaccaccggattcgtcgacgttgttcgcggcaccacgcaatggccgattggcaggggagcggcgggcaaggccgcatccgagtcaagtgctcaaatgccctcgctgcgattcgctaaacacaaagttctgctactacaacaactacaatctctcgcag

SEQ ID NO: 1549 - DNA, 395 bp, Pinus radiata; identical to SEQ ID NO: 414

SEQ ID NO: 1550 - DNA, 634 bp, Pinus radiata
gtccgctcgaggtacgcaaagcacctacgcagcggcattcgaactctctacccatacgtcagatttcacagtgacccttgaatacaggtaagcgtaaggatgaattttgacaatggaggatcacggaggggacgacgcattcagagtgatgtagtagggagacgcacatttcgtcgcagcgagccttatagactataccctaatgataggaatggatatggtcccaggtcttccaggcctattgagctttgtaacaactgcaagcgaacagggcactatgcacgagagtgtccaaatgcttctgtatgcaacaactgtggagtttcagggcacattgcatcgaagtgtccaaaagagcaattatgcaggaattgcaagaagcctggtcatcttgcagctgattgccgcaatgagcctgtctgtaacatgtgtggtaaaacaggtcacatggcaaaggaatgttctgctcatgagctaggacttccaaaatcagcactctgcaagaagtgctatttgcctgggcatattatggcagactgtcctaatgataaggcctgcaataattgtcgccagactggccacttggctcgagattgtatgaatagcccggtttgcaatggctgtggtgaacctg

SEQ ID NO: 1551 - DNA, 612 bp, Pinus radiata; identical to SEQ ID NO: 477

SEQ ID NO: 1552 - DNA, 562 bp, Pinus radiata
gtcatccatattttctttttcagtctgcaatacaaattgttattcgagatacgattgatcatgcttgaaggctatgcctatgcttgcggaaacataccgtgacagctttgagacgacttcgggaggtagcagcgtggatctggtaggaatggctctaccaggtttggcccctaatttgtcttctgcttcagtttcagcttcagcgtcggaagattctgccaagaaaataaggaaaccctataccatcaccaagtccagagagagctggtctgagcaagagcacgataaatttctcgaagcccttcaactatttgatcgtgattggaaaaagattgaagcttttgtaggatcaaagactgtcatacagattcggagtcatgcacaaaagtacttcttgaaggtccaaaagaatggcacaagagaacatgtaccacctcctcgtccaaaacgcaaagcatctcatccatacccacagaaggcctcaaaaaatgttcctgtgtcacagcaagtatcaactgcttttccaactgctgctactcaactagattctggatattatcca

SEQ ID NO: 1553 - DNA, 392 bp, Pinus radiata
caacaatgttccatattgagacctacttttgtccgcattgcctccactccagaacgttgtattttctttaatgcattgcgcctcaatatcttctcttttgattgcacagtcgccaaacccatgcttctataccttgagactaatgcacgagaaagagcaacatctctctcaaccgttgggcgtggcctctgacggtaataacgaagaaattcacgagaaccaagcatcttgcatgttgttccattttcagactttctttggattaccagttcagcccctccaaagccaagttcaatattgacattgagattttcttctgtgggcactatttgcatcccactttcatccgtgtaactgctgctgtagtcataaaagtcggctaaatcactatc

SEQ ID NO: 1554 - DNA, 570 bp, Pinus radiata; identical to SEQ ID NO: 546

SEQ ID NO: 1555 - DNA, 392 bp, Pinus radiata; identical to SEQ ID NO: 521

SEQ ID NO: 1556 - DNA, 364 bp, Pinus radiata
ccttaccgaggggaagcaacgaggtgtttctcttttcccacaagaagatatcaagcaaatagttacacaccaagaaaatccacaatgggtagatctccttgctgcgcaaaggaagggctcaaccgcggggcctggacgaaaacggaggatattattctctccgaatacattcgaattcatggcgatggtgggtggagaagtctccccaaaaaagcagggcttaagcggtgtggaaagagttgtagattacgttggttaaactatcttcgtcccgacattaaacgcggagacatttccccagctgaggaggagctgattattcggctgcaccgccttcttggtaatcggtggtcgctgatagcag

SEQ ID NO: 1557 - DNA, 355 bp, Pinus radiata; identical to SEQ ID NO: 416

SEQ ID NO: 1558 - DNA, 478 bp, Pinus radiata
aaaaagctgtaaaacggtatatatagagcgctctccagtctaacatcttggattgattgttttctgttagaaattcccatcatccctctgtgtcttcctccttttgaatccagagactgtttttatggtggctgtaaatgctgaaataatgcccaaattcgaagggaagtctgcgaaatccctggattcaacattcaagctgttcggcagaacgattgctgtgaaaaatccctgtgatagcagcagcaatggtattcatgtcgatgggattccagctgaagcagtgaattcagcagtccccaaggcttctgaaacgcatcatcatgatgagaaacagaagcagaatgaggattcagaaaaggtgggtaaaaagcccacaaagcttgtgccctgccctcgctgcgagagcatggataccaaattttgctatttcaataactataatgtcaaccagcctcggcattattgcaggagatgc

SEQ ID NO: 1559 - DNA, 389 bp, Pinus radiata
agaaggttggaatggcttagtccgctcatttgatggcgaacagatctttgtggggaggttcagactttgattatgagaacgaagccgatacgaggaagggtccatggactgtggaagaggacatgcagcttggtattgtaaatttgcacggagaaggacgctggaactttctcgccagagcatctggcctccagagaactggtaagagctgccggctaaggtgggttaactatctccggcctgatctcaagcggagcaagatcactcctgaagaagaacgtttgattattgaactccatcgccgttggggaaataggtggtctcgtattgcacaaagtttaccgggaaggacggacaatgaaatcaagaatttctggagaactcgtatg

SEQ ID NO: 1560 - DNA, 354 bp, Pinus radiata
agatgcctcgggtagcagtttacaagagcctgaggagaatgatgaagaacttgctcaagctcttgaagcaagtttgaaaatgggttcacagcaaaatcctcccagtcagcctccatcatactcttaccctagaggatacaggatctgtgctggttgcaatcatgagataggctatgggcggtttttaagttgtatggggaccttatggcatccagattgtttttgttgtgttgcatgtagtctacccatacgtgaacacgagttttccatgtcagggaatgatccataccacaaatcctgttacaaggaactccaccatccaaaatgtgacgtttgccaccagtttatccctac

SEQ ID NO: 1561 - DNA, 248 bp, Pinus radiata
gccaggtgaggcattggcagtcaattttgcattccagctgcatcacatgcctgatgagagtgtctctaccaggaaccccagggatcaacttttgagaatggtaaaaggcctgagtcctaaagttgtaacagttgtggaaagggaaatgaacactaatactgctcctttcctccctcggttcatggaggcactgaattactactcagctgtgtttgaatccttggatgttagcctcgaaagggaaaacc

SEQ ID NO: 1562 - DNA, 346 bp, Pinus radiata
tctgtaagtgcttgagggcttcttgtatcgatgaggccattaacgatgggaagatcttttagttgttggagctgttcaaaagataatggccacgagcgtcttaatcgtggatcttggagtgctgaggaggatacaattttgagtgaacatatcaaaactcatggagttggtcgatggacatctcttcccaagaaagcaggtctaaaacgatctgggaagagttgcagattacgttggtttaactatcttcgttcagatatcaagcatggaaacatttctccggaagaagaggaactcctcatcagattacatcgtctccttggcaatcgttggtcgttgatagcag

SEQ ID NO: 1563 - DNA, 354 bp, Pinus radiata
gtttggggatatatcagaatgcaggacactgctgcttccacatctacacagcatcagtcaacaagtgaaaaatcttcaagttcagcagctccagccccatttagacaagccaaagatgcaattgagagcgatgatgatatcaggagggttcctgaaatgggaggaatgcaagcaggtccatctacatgtgtgcctatgaggttagacaatccccaacctagcacaggcgttgttgcccacaggaagagagggagagcccctgcagacaaggaacacaagcgtctcaaaagattgcttaggaacagagtatctgcccaacaggcaagagaaagaaagaaagcatacttaaatgat

SEQ ID NO: 1564 - DNA, 324 bp, Pinus radiata
tagctgccgagtgtacgaatgagaaggcatgcaacaactgtcgcaagaccgggcatcttgctcgtgactgcaccaacaacccagtttgtaatttgtgcaatatatctggtcatgtggccagggagtgccccaaggctcgcattttggatggtaataggggtggaagatttattgacgataggcgtggaagatttaatgacataatctgtaggacatgcaacgagccagggcataccagtagggagtgcactggaattctcatctgccacaacttgtggtggccgtggacatgttgcatacgaatgccccctctggtcgtgtgat

SEQ ID NO: 1565 - DNA, 421 bp, Pinus radiata
aacggaaacaggaccggactctggctgctgccctccctcattaaccattcctgtctgccgaactcgaggtggctgttagtgggaaatgccatttttatacatgcctccaaggccatcgggagtggagaagagatcactattccttattttgatgttctggctcccttgttacggcgccaagctgactgtaagaactggggtttcaagtgcaagtgtaagagatgcattctggagcactcattcaggaaattcctagaacctataattgccctaaagtttgagcaattggatgaccaagcaaaagaattgcttgctggattggatcatcgggaaagtgcagaaatgagtcaccgggaaaatgcagaatttgcaatgtttgttccagaggcagaggagatcatccggagttcccatgtgttga

SEQ ID NO: 1566 - DNA, 390 bp, Pinus radiata; identical to SEQ ID NO: 524

SEQ ID NO: 1567 - DNA, 353 bp, Pinus radiata
gtctaggggaaaagctttgaaattatttgggtttgagtttagagggtcagaaggtggatcatttgaagggactaatggttctgatcagccacaagatgggactaatatattaactgcaggtgaagcatccactgagccagtggaggaagaactagtgattgaggccaaaaatggagattcagggaaattagaagatgtgggtagtccagtagaggctggagaaagtggtagcactagcaattgcctgggatcatctgctcaagaaaatcggaaatatgaatgccaatactgttgcagagagtttgcaaattcgcaggctctcgggggccatcaaaatgcgcacaaaaaagaga

SEQ ID NO: 1568 - DNA, 436 bp, Pinus radiata
agtattgaaattcccctgttttgatctgatagctatggatctgatggagtcttttgaggcaaaggggaagggagagaagaggagaacggtgaggggaaaaacccagttgaagaggattgagaacgggaccagcaggcaggttactttttgtaagcgcaggaacggtctgctgaagaaagcttacgagctctcggtgctttgtgatgccgaagtggcacttattgttttctctccaagagggaagcgctatgagttcgctaatcccagcatgcagaaaatgttggcacggtacgaaaatttttcagaaggaagtaaagcaacgagtacagcaaaagagcaagatgtccagggtttaaaacgacaaattgcgaatatggaagaaagggttgaaattcttgaatccatgcatagaaagatgttgggggatagctggcat

SEQ ID NO: 1569 - DNA, 349 bp, Pinus radiata
gttcaattttttcacttgcagtggaaatagaagcctgcaggtacctctaggctaccggagttcaaatcccgcacgatcacactcccttcttttaacattccgagttcgaatccccggaaacttctcgacatggttaagccctcgcaaaaacagaatatccatgtcaatggcaagccggaaagccgctcactgatgtcgcggcaattcaagggaatccggctaaggaaatggggaaaatgggtgtccgaaattcgaatgcccaattgcagggccaaaatttggctgggctcctacgaatccccagagaaagctgcccgcgcctatgactttgcagcgtattgtctgagag

SEQ ID NO: 1570 - DNA, 580 bp, Pinus radiata; identical to SEQ ID NO: 541

SEQ ID NO: 1571 - DNA, 469 bp, Pinus radiata
gttgacggagcaggcagagcgcattggtcgcgtcaagattggcagcaacggtttgttgctgttggcgacgcggttaaaggtggcagcatttgacctggaaacacatgggatttttttcagagtggaagaagaagcagatgatgagattatcgttgaatctgtagatgttaaccgggacagggttttggtagcgtcaaatgacggtaatgctagggttcgtcgaatgaggacactcgaaaacatatgcaccttaccgtttgacggtttaggcggagcagatgataacagtagcggtagtaataacaataacaatagtagaaaaattcttgggactttgaatacatggctggcatttgtctgcattgacggtgtggtgcacgcttgggacgctgacagcggcgcacgactctaccgtttggtagaacaagtcggcgatgtgttcgatttggtatcagacaatgaacacgtg

SEQ ID NO: 1572 - DNA, 337 bp, Pinus radiata
gggaggcagagaaggaacggaaaaaggagtgaatttttgtgggtttgtgtttattgggaagatggggtgtgtgtcgtccaaggtggagaatgaagaattagtgaaaagatgcagggacaggaggaggctaatgaagcaggcagtgaattccaggcacaattttgctgcagcccacattgcttatttgagggctctgcaaaacacagggaatgctctggtacaatttgcggagggggaatccagtgctatgaatggcaatgctattgaagaagcggccacaccaatgccagcgaccccattaacagcatctcatcgccatcccatgaaattccatcct

SEQ ID NO: 1573 - DNA, 341 bp, Pinus radiata
gttctatactgtcacggtgtttcttttaatggctcgttcctcctccctcaccatggagaagaatatgtactgtagttctactattctggagtatgacactgaggaagggagtagtttagattgggaatgcgacatgtccgaggaagaagaagatcttataatcagaatgtacaaacttatcggcaacaagtggtcgctgattgccgggcgcattcctggaagaaaagcagaggagattgagaggtactgggccatgagaacccaacaattgtgcggcggcgatgatgctattttgacgaagaaacagcagaaaaccaatatgatatcgattaagtaccgcg

SEQ ID NO: 1574 - DNA, 479 bp, Pinus radiata; identical to SEQ ID NO: 540

SEQ ID NO: 1575 - DNA, 402 bp, Pinus radiata
attgatgggatcaccccttggaggaggacttggtctttcccctagaatgggtggagggattgggaatggcctcaaggaggattgggggtgggcttggcgggtctcggagctactgcgcttaccattggagcagcatctcccgccaaccagctttcttctgatggtatgggcaacagccatggagacaactcaacagtatcgccaattccttatgggttggacgtaagtgtaagaggcaggaaaagaggtggaccggtggagaaagtagttgaaagaaggcagagacgtatgataaagaatagagaatcggcagcaaggtcgcgagctagaaaacaggcatatacccgttgaattggaagcttgaagttaccagacctcaaagaagagaacaaggaattgcga

SEQ ID NO: 1576 - DNA, 355 bp, Pinus radiata
cttcagccgcttggagtccacttcccagctgctacatccgttgtcctccagcgcactgctgccatcgtgggagaagccgtcgctgctccgcttgcgagcggcgtctaagctgctgatttcgtcgtccaggtggacaacgatgcccttttcggggtcccggcagcgcctccgtagcgtggagttccagtggttcttgatcgcgttgtcggtgcggccggggagggctcgggcaattgttgcccatttgttgccgtgctgcgcgtgggcctgcagaatagcagcatcctcggacggggtaaaaggtctgtgctccacctgagggctcagctgattgcaccaccgtagcctgcacgat

SEQ ID NO: 1577 - DNA, 463 bp, Pinus radiata
gtgaaacttgagcaatttaacttgattctgtggagactgatgctgatgagaaaattgaggacaagggaggaagcttgaaaatgactcgccaccagaaacgcaaaattgatgaaatccacgttgaagagggtcagggtcatgaggattttgatcctgctagccttcgagagcatgaggagtttacgaaagttaagaacatagcaaaggtagagcttgggaggtatgagattgagacgtggtacttttcacctttccctcctgaatacagccattgtgagaagttattcttttgcgaattttgtctcaatttcatgaagaggaaagaacagcttcaaagacatatgaggaagtgtgatctgaagcatccacctggagatgaaatatatcgcaatggaaccctctccatgtttgaggttgatggaaagaagaacaagatatatgggcagaacctctgctatctggc

SEQ ID NO: 1578 - DNA, 343 bp, Pinus radiata
  misc_feature (20)..(20): n is a, c, g, or t
  misc_feature (120)..(120): n is a, c, g, or t
gaaacaccaaggttgggatntctagaacgaagcatacgacaacagcgcgcatttcaccacttaggattgatggagcagcacccttggcgaccgcagagaggacttcctgaacgctctgtntctgttcttcgtgcatggttgtttgagcattttctgcacccgtatccaactgatgcagataagcatatattggctaagcaaactggccttacaagaagtcaggtatcaaattggtttataaatgccagggttagactatggaagcccatggtggaggagatgtacatggaagaactcaaggaagaaaaagtggaccaaggtacacacaattctgaagctgaaa

SEQ ID NO: 1579 - DNA, 530 bp, Pinus radiata
cggcaagtggggagtgccggacaatttgtatggagctcaggaagacagtggtggaagtagtgttaaacagaagaacttgaaggatggggaccaattcaccagtagtgatgaagctgacagtgaggtcaatgaattcaacattatgaaaagaagcaattcaggggttggatatgaagataacaaaagaagtggggggcaaggtgatggcaatcagtacaggtcacgtcactctcggagcatctccatggatagcattatgagtaagatgcataacttcagtgaagacttggaacaggaaccgtctcaaggtcggaatgtcagacactcccatagcaattcgatggatggaagtacaaatttcaatgtggaattcgggaatggggaattcagtgcatctgagatgaagaagatcatggccagtgagaaactggcagagcttgcaacggtggatccaaaacgtgtcaaaaaggatattggctaatcgccagtcggctgcacgctccaaggaaagaaagatgcgctatatctca

SEQ ID NO: 1580 - DNA, 561 bp, Pinus radiata
ctccactaactccttcatttcaacactcacagcatcggatccgtgcgataaaacttctatactggttcgatctctcagcccaacagccgtaggccgaccgccattatcgtcctctaagaaagcttgcatccatggaaaacctgacgatctctcaggaaagtgtaacactacaggcggacgctgccactgctcttcaaaacgcaagaagtccagagtgaaaagaactatcagagtacctgcagtcagtgcaaaattggcggacattccatctgatgaattctcatggcgaaaatatggacagaagcccattaagggctctccacatccaagaggctattacaaatgcagcacagtgagaggttgccctgcaagaaagcacgtagaacgcgccctggacgatccaaacgtattgattgtaacatatgagggcgaacacagccattctcattctggatctgaaaacacaggcctggtactggattcgtgagacccacatacagacaaagacattattctagttttatattacgctacagaatccgccattattacagcgggatg

SEQ ID NO: 1581 - DNA, 357 bp, Pinus radiata
cccagaacggcataagcactgacaaaggattttaagatctgtgcgatgtgggatatggatttgccttcccaagggtcaagtttgagttcatctggttcagtttggactatacaacagaacaaaatttttgaaaatgctctagctgattttgataaagacaccccagataaatgggagaaagtggcagccaggctgcctggaaaaactgctacggatgttagaaagcattatgaagatctcgtggaagatgttacttgtattgaagctgccgcgttgccctacccacgtacagtaactcttcctgttcacatgaatggttagaaaaatcaggcgctatgcacggattgaagcaacaat

SEQ ID NO: 1582 - DNA, 522 bp, Pinus radiata
gcgagctaggcggtacgtaagcaggagagagatttattttcttgtgtttcagagtttttgcagtgcgtctaaatggcggtagaaaccatgcggatgtcgagggtgagactaggaagttgcgaggacgaatcccgggccgtcaaagaaacccatttcaggggcgtgcgaaaacggccgtgggggagattcgcagcggaaatcagagatccatggaagaagactcgagtgtggctgggcacattcgacactgccgaggaagccgcccgtgcttacgatactgccgccaggagattgcgcggccacaaagctaagaccaatttttctgtcaccgccgactaccacaataacgctggtgcgcccgcactttcctggactcaggcgctgcatcctcagcagccggatctgaacgccgcggcttttgctttcgtatcaaacaagagacgtgaagtttcctctggaagcgaccggctcgagttcgaatctcccaacaattctcttcacgctgcacctctgagcaggcgg

SEQ ID NO: 1583 - DNA, 530 bp, Pinus radiata
ggcaggagttcccgcaagctttaagaacccttccctttgtgttagacctccaggttcctcaggtacgcagtctctacatcgcgtgacgttcaagggagacgggatattcagagtccgatcgccgccatggccgtagacaccatacagatggcgagagtgggtgtaaaaatgaagatcggaggaggcggctgcgaggaagaggcgtcctcggctgtgaaggaaacgcatttcagaggagtgaggaaaaggccgtgggggagattcgctgccgagatcagagatcccttgaagaaaaccagagtctggctgggcacttttgacactgcagaggaggccgcccgagcctacgataacgctgccagaaatctccgcggggccaaggcgaaaactaattttcttctgtctccccacaatgacattagcaccaagggcagcagcagcgccgccctgtcgagcaatagcaccaccagcgccgcctctggtcaaatccaaaaccaatggcccctgcggccatatttctattcgaatca

SEQ ID NO: 1584 - DNA, 435 bp, Pinus radiata
gcattgctctgctcgaacacatagtagtctgatctctgcgcttcgagcactacgagaattgcttcaccattaccttcatcatccaccaatggcggccgaagattttaatgacaagaatgctgtattcagaaagctccgggccaaacccgacaacaagatgtgctttgactgtaatacaaggaatcccacatgggcatcggtcacttacgggattttcatctgcctggattgttctgcatctcatcgtagtcttggtgttcacattagctttgtcagatctgtaaacctggactcatggactcctgaacagttgaaggtcatgagctttggtggcaatggccgaggacatacattctttaagcagcatggttggaatgatggaggtaaaatagaatcgaaatacacatcaagagcagctgagctatatagacagct

SEQ ID NO: 1585 - DNA, 362 bp, Pinus radiata
gaaagacttgcagcttacatggtggagggtcttgctgcacgaatagcatcttcaggaaacggaatatacaaagctttgaattgtaaagcgccaccaagcactgatactttatctgccatgcaaatattatttgaagtttgcccatatttcaaatttggttgcatggtggccaatggtgcaatttgtgaagccttcaaggatgagcagaaggttcatatactagattttgaaattgggcagggaagtcagtacataagcctcttaaatgtccttgcagaaaggcctggtgggcctccacatttgcgcataactgcagtagatgattctgaagatgtaagatatattcctgggggattggataa

SEQ ID NO: 1586 - DNA, 362 bp, Pinus radiata
caggagccgaaaagacaaactacgaacaaaatccctgtccaaataacaagaaaaatggcagagtcacaggggtcgtctacacattacaaaccgtacaggcagaagcagactctctcaggccaccgtggagcggtctcgtgcgtgaaattctcaaaggacgggcgtctcctgggcagcgcttctctggacaaaacaatatgcatatggtcggcctctgcttcttcttctacctctgcattcaagcgggagctccacggccacagcgagggcgtctccgacttcgcgtggtcgtccgactcccgctatatctgctcggcttctgacgacaagagcctccgcatctgggacgtccacacgggcga

SEQ ID NO: 1587 - DNA, 389 bp, Pinus radiata
cttcggtctgcctgggtgcgtttctgaatttctcgccaagtgagtgagtcgatccagccttgtttcagcgaaacctgttgtggttttgggttttcttggcttttgccttttcattctttgtttccttggattcgaactcgagatctcctgaatattatggcacaggagagctggaaccaggaggagaccgggtgccaagtcccggaagggctcatgcgctgtgccaacaactgtggcttcttcggaagtccggccaccatgagtctctgctccaagtgttaccgcgaattcgtgctgctcaactcccctaaatcgtccttcgataagccgcaacagcagctgccgatgcaggacgaggtatctatcccgagacccgacgttgctgctga

SEQ ID NO: 1588 - DNA, 416 bp, Pinus radiata
  misc_feature (78)..(78): n is a, c, g, or t
cagcaatggcggcccagactatcatcgctgcctctatggcatctcctctaacattatcaaatggccactatccgtttnagtccgagttcaaggggtccgtggttcgaatcccgcagagggcattttccttcgcgcctgcagcccgggcgctgaccgtcgtcgcataggccaagaaggccgttgccgcgctcaaagggaattcacaggtcgagggtgttgtcagtctctcgcaggaagacaggggtcccacaacagtgaaggtccgtttgacaggactgactcctgggaagcatggctttcatctacatgagtttggtgacacaaccaatggctgcatatcaacaggagcacattttaatccaaaaaaattgacacatggtgctcctgaggatgatgtacgccatgcgggtgacctg

SEQ ID NO: 1589 - DNA, 507 bp, Pinus radiata
tgcgagtcaatgttctaatgatcccatttgtcacacatgcggcaaatctggtcacctctccagggattgtacggctccagagcttccccctggagacattaggctttgcaacaattgttacaaacaaggacatatagctgccgagtgtacgaatgagaaggcatgcaacaactgtcgcaagaccgggcatcttgctcgtgactgcaccaacaacccagtttgtaatttgtgcaatatatctggtcatgtggccagggagtgccccaaggctcgcattttggatggtaataggggtggaagatttattgacgataggcgtggaagatttaatgacataatctgtaggacatgcaacgagccagggcataccagtagggagtgcactggaattctcatctgccacaactgtggtggccgtggacatgttgcatacgaatgcccctctggtcgtgtgatgctgcgggacatgcgcaggcattgatgctgcagtttctacaccacctgact

SEQ ID NO: 1590 - DNA, 370 bp, Pinus radiata
cgatattttatgttgttgaagttggcaaaaggagcattggtcttaaaaggtcaaccctgtaaggtcctgatcaaccctttgacaagataaaaatggacagaaattcagaattttatgaagagacatcgtcacagaaaaatcaggcatccggatcaagtgatggaggtagttttgattgcaatatttgcttagaattagcccaagatcctgtggtgactcaatgtggtcatcttttttgttggccttgcctataccaatggctacagatgcactccatatcaaaagaatgccctgtttgcaagggcggtgtagttgaagagaaggtaattcctttatatgggaggggtaaggtgggttctgctgatccaag

SEQ ID NO: 1591 - DNA, 308 bp, Pinus radiata
gttcccaggagaggagagcctcagctgtctcgatctggcgttaaggggttacagaagaagaatttcgaagatggttagatcttcttgctattcaaagcaaggtcataggcgtgggatttggacccctatggaggatatgattctctctgaatacattcgaattcatggcagtgatggatggaaaaatatcgctaaacgagcaggtcttaaacgatgtggaaagagttgcagattacgttggttgaactatcttcgccccgacattaaacgtggtaacatttctcctgatgaggaggacctcattatta

SEQ ID NO: 1592 - DNA, 361 bp, Pinus radiata
ggatattctggtgtgcattgctattctggccatgaattttggcagaatgtgcgattagggtttgattctgggtgttcttttcaggtacagcagagatttgaaggggatttgaatttgaatcatggaagttgagtgctgcagccctcggtcttccgctcaggggtgtgaggttgacatgaagccaacgatggtggtggaagatacgcttaatcaaggatgcatgcaatatggatgttcacactaccgccggagatgccaaataagggctccgtgttgtaatgaagtctttgactgtaggcattgtcataatgaggccaaaaattcaatggatgtccatccacttgacagacatgatgtaccg

SEQ ID NO: 1593 - DNA, 378 bp, Pinus radiata
  misc_feature (222)..(222): n is a, c, g, or t
accaagctcatcacatggcgtccgagaaggaagctgctcttgctgccacaccaccagaagatgataaacctacaatatttgacaaaatactgcagaaggagattcccagtacagtggtttacgaggatgagaaggtacttgcattcagggatatcgcaccccaagcacctactcacatcattatcatccccaaagtaagggatggcttgactggcctatctnaggcagaagagaggcatgaggatattctaggtcacctgctatacactgcaaaagttattgcaaagcaggaaggtttatctgatggcttcagaattgtcattaacgatggtcctactggatgccaatctgtgtaccatttacatattcatctactcg

SEQ ID NO: 1594 - DNA, 333 bp, Pinus radiata
gattgacggatcgattgcaatggcgtttgcggaagagtattccgatcgcgatgccgtatttcgaaagctgaaggcgaagtctgaaaacaagatttgttttgattgcaatgctaaaagtcccagttgggcgtccgtgacatatggagtattcatttgtcttgattgttcagcaatgcatcggagtcttggtgttcatgtcagttttgtgaggtctacaaatctcgatacatggaccatggagcagttgaaattgatgagctttggtggtaatggccgtgcacaattattctttaagcaacatggttggactgaaggtgggaagattgaatcaaa

SEQ ID NO: 1595 - DNA, 356 bp, Pinus radiata
ccttaacgttgtctatgtgttgatatatatcacaagtgccgtctatcgcctccttcggttcctggggttccgagagtttgtggaacccgagacctcctggccagatgaaatcaacccacggttgaagcccgtgacattttccgtatctgcgcagaggattcgtgagcgattaccagtagttcggttcggcgttttagcggaggaggccggtgatgaggatgttatgtgcgctgtttgcttaaataacatgcagaggcatgaggagatccgaaggctaacgaattgccgtcacatcttccacagagactgtatggacaaatgggttgatcatgaccagaacgcctgtcctctctgca

SEQ ID NO: 1596 - DNA, 378 bp, Pinus radiata
  misc_feature (172)..(172): n is a, c, g, or t
gtcaacgagaattgccacgatgggttaatgtggatttaggtctgggaagctttaggataagttaatgtaccgaagtgtggttaattttagtaaagaggattgtgttttatcatgcggatccagtgcgatgcctgcgagcaggcagctgcttcagtgatatgttgtgcagacnaggctgctttgtgcagggagtgtgatataaaagtccacaaggccaacaagcttgccagcaaacacaagagattgcctcttgtcggaacttccccaaagctctctcgctgcgacatttgccaggatagggcagccatcgttttctgtctcgaagatcgtgctatgctgtgccaagactgcgatgagtccgttcattctcgcgacaca

SEQ ID NO: 1597 - DNA, 387 bp, Pinus radiata
tcgataatagcagggagagtccccggccgaacagacaacgaaataaagaactactggaacactaacttgagcaagaaacttgctgtcaggggaatcgatcccaagactcataaaaaaatcacgacggacggcacgaacagagtcaacggtgatcgtttcagccagaggaaaggtgagaaaatatatgattctccacagaaacctcgacagccggaaagaaatgttgcgagggccgcccaatcaacagggctcgtgattcctaatgttcacaatctaaaagcggatttaaaagcgcaatatattgcaagaatcagagaatttaaaagctctaatactatcagctcctcttctcgacttaatgcacagattgagccaaagtccagagag

SEQ ID NO: 1598 - DNA, 276 bp, Pinus radiata
ggtttgtcagatttggtgacgagaatgagaaaaaccgagccatgactgaaatgaatggtgtttattgctcttcaagacctatgcgaattaatgaagctacaccaaagaagtccttgggatttcaacaaccttattccatgaaaggtaactattacacacaggcatatggtggtgcagttgctagtcaggccttccagtcagacaatgatccaaataatacaactatatttgttggtgggttagatccaaatgcgacagatgaagatctgaggcagg

SEQ ID NO: 1599 - DNA, 374 bp, Pinus radiata
  misc_feature (60)..(60): n is a, c, g, or t
cacatcttgagcgaataaaaaatctacgtgatggtggagctggtgctgaagacagcgacnaaaaggatgaagactttgttgcagaaaacgatgatgctggatctccaacagatgagtcagaagaagagggatcagatgcaagtgagagtgcagaggtcaagcaacctgcaaagaaagaagtaaagaaaaaaaaggcggtggctcccaaggcaaccgagaccaagaagaagaagaaggacgacgaggaagagggaggaaagaaaaagcagcggcgaaagaagaaggatccaaatgcgccaaagaaagccatgactggatttatgttcttttctcaagttgaaagagagaatctgaaaaagagtgacccaagaatg

SEQ ID NO: 1600 - DNA, 334 bp, Pinus radiata
gatctgtgttgctgtttgattccgcaagcttggggagatcaggatctgctctttgttgtaaatgtcgatattacccaaatcagattccattcatattagggaagtatgggccgataatctggaagaggagtttaatctgatcagggaaattgttgatgactaccctctgatagccatggacacagagttccctggcatagttgtgcgacccgtgggcaaattcaggaccgtccaagaatacaattatgaaaccctaaggtcaaatgtagacgtattgaaattaatacaattggggctgacgttttctgatgaaacggcaacctcccaaactgcg

SEQ ID NO: 1601 - DNA, 401 bp, Pinus radiata
  misc_feature (399)..(399): n is a, c, g, or t
gttaggccagctcttagttcgagtccgggccgctgctcttaatcctgccgactttaagagacggaaaggcttattaagaaacgcggattccgattttccgactgtgccaggctgtgatatgtcaggagtggtggtggaaattggtgatggtgtctccaagttcaaggccggtgacgagatatacagcaacatccagaatttcgcagcagggaggccaaagcagtgcgggactctcgcccagtacacagtggtggaggaattcctggtagcgccgaagcccagtaatttatcatttgaggaagccgcgagcctgccgcttgcgcttcagactgcgcagcagggcttcgatacaaccaattttgaaaaggggcagagcgtgttcgttgtgggaggctcggncg

SEQ ID NO: 1602 - DNA, 462 bp, Pinus radiata
ggtttgtcagatttggtgacgagaatgagaaaaaccgagccatgactgaaatgaatggtgtttattgctcttcaagacctatgcgaattaatgaagctacaccaaagaagtccttgggatttcaacaaccttattccatgaaaggtaactattacacacaggcatatggtggtgcagttgctagtcaggccttccagtcagacaatgatccaaataatacaactatatttgttggtgggttagatccaaatgcgacagatgaagatctgaggcaggtttttgggccatatggagagattgtgtatgtgaaaataccagtgggcaaaggatgtggttttgtacaattcaccaacaggtcctctgccgaggaagctttgcaaagttacacggcactgttattggtcaacaatctattcgcctttcttggggtcgatctccagcaaacaagcagactgcaagctg

SEQ ID NO: 1603 - DNA, 358 bp, Pinus radiata
cagcgaagccgatttccaaagatggatagggagaaactcatgaagatggctggtgcagtccgcactggcggaaagggtacaatgcgaaggaaaaagaagacaattcataagactgccacggcagatgacaagagacttcaaagtaccttgaaaagaataggcgtgaataacatccctgctattgaagaagtcaatatttttaaggatgaccatgttattcattttgctaacccaaaggtccaggcttctattgctgccaacacatgggtggttagtgggtcatcgcaaacaaaaaaacttcaagatcttttccctggtatcatcaatcagcttggaccagagagttttgccaatctga

SEQ ID NO: 1604 - DNA, 358 bp, Pinus radiata
accaagctcatcacatggcgtccgagaaggaagctgctcttgctgccacaccaccagaagatgataaacctacaatatttgacaaaatactgcagaaggagattcccagtacagtggtttacgaggatgagaaggtacttgcattcagggatatcgcaccccaagcacctactcacatcattatcatccccaaagtaagggatggcttgactggcctatctaaggcagaagagaggcatgaggatattctaggtcacctgctatacactgcaaaagttattgcaaagcaggaaggtttatctgatggcttcagaattgtcattaacgatggtcctactggatgccaatctgtgtacca

SEQ ID NO: 1605 - DNA, 461 bp, Pinus radiata
gcggactttattgtaaaagagccaatggtgattggtcatgagtctgctggaataattgaggaggttggcagtgaagtgaaacatctggttcctggtgaccgcgtagctttggagcctggaatatcgtgttggcgttgtgaccaatgtaagcgaggctcctacaatttgtgtcccgagatgaagttttttgcaacacctcccgtgcatggttccttggccaatcagattgttcatcctgcagatttatgtttcaagttgccagataatgtaagtctcgaggaaggtgccatgtgtgaaccactcagtgttggggttcatgcttgtcgccgtgcttctgtaggtcctgagacaaatgtcttggtaatggggcaggtcctatcggccttgtcaccgtgctgtctgcacgtgcatttggagcttcacgaattattattgctgatgtagatgaagagcgtctgtca

SEQ ID NO: 1606 - DNA, 463 bp, Pinus radiata
gccactgtttgtatgtgatctccgggccttgagcttatacgtttttcagttgcaggtttggagcctgtcaaattatacttaccatgatttggaaagaagctgcgacagtgctacacaaggcccaacatctggagaagccacccttcatctttactgtatttatcgcatcttttataggattcgccgccttctcgtatctcatcactaaccgtagaactagggaattacgaggaatcccgcccggcacctttggatggcctttgatcggcgagacattagaatttctgggatgccagagaaggggaaggccccaggatttctgtgaccgtcgaacacagaagtatggaaacgtgttcaccacttcccttgtgggcacccgacagtggtattatgtagtccccaaggcaaccgcttcttgttcgccaacgagaacaaactggtggtaaattcatggcccgcctct

SEQ ID NO: 1607 - DNA, 410 bp, Pinus radiata
tcctgactttgctaatgagacattcggcccaagcttagtcgttgttatcgctgccctgttcctctcaatgctatgctttttgttgttcaatgccctgctccgctgcagacggctctacaggcgatggcgagtggtgtcggagccatcacccaatatggatgtcgaaagaactgaatctggcatcgagaaaaaggatttagaagcactttcagccacagtttaccgcaaagcccaccccctcagagccatggattgccccatttgcctggcggaattcaaagaaggagaaaaggtgagagtattaccagaatgctgtcactgtttccatgcagattgcatagacgcatggctgctttccaatgcttcttgtccttcatgtcgacacactgtcctttgcgcattgccgaaga

SEQ ID NO: 1608 - DNA, 357 bp, Pinus radiata
taataattgggtactgtggagattttcctgtgcattgaccattacaatggctgagacagtggttttgaaggttggcatgtcttgcgaaggttgtgttggagctgtaaaacgagttctcaataaaatggaaggtgtggaaacatatgatgtgaacttgaaggagcaaaaagtaactgtgaaagggaacgtgaagcctgatgccgttctgcaaactgtttcaaaaactggaaaggaaacatccttctggccagaagagaaggatgccaccacgtgatggtgcatattctcaggtttaatatagatatggacatatattgaacatgcttttttgaggcacttttaataatatttctaata

SEQ ID NO: 1609 - DNA, 222 bp, Pinus radiata
ccaagaacgcgggaaggaagaggatgaatttgtacagaggcatcagacagcgtccatggggaaaatgggctgcggagattcgagatcccagaaagggggttagggtttggcttggaacgtttaacacggccggaggaagctgccagggcctatgacgcagaggcttagaagattagaggaaagaaagctaagcttaactttaccgatgattcatgctcagta

SEQ ID NO: 1610 - DNA, 302 bp, Pinus radiata
  misc_feature (161)..(161): n is a, c, g, or t
gttcagcctatggttgtctgctaaatcgcttccacaaatgtcgatccatctggagagacctcttataactgaaatacaagtgcgtatggactgtaatggctgcgttcagaagatacgcagagctctgcaaactcttcaaggcatttatgacgtttacatanatttcccccaacaaaaggtgacagtggtaggatgggttgatccagacctattaatgaaggccataaagaaagccgggaaaagagccaaactgtgcagccacgtacgcgatgaagaaacggtcgagagagccgacccggcgg

SEQ ID NO: 1611 - DNA, 268 bp, Pinus radiata
gaatgaagttagatacggcaaagaaaggccttcctccaggcaccatgggatggcctctctttggagaaactcctgattttctcagatatggtcaacaatttatcaaaaacagaaaggccagatatggagatttgttcaagactcacattctaggatgcccgacggtgatatcgacggatccagctctcaacagatatatcttattgaatgaaggccgaggactaattcctggatacccgcagtctatgcttgacacattgggaaaatg

SEQ ID NO: 1612 - DNA, 312 bp, Pinus radiata
gctcactggaataaacactcttcgcatccagcccttcaaacttcccctcttggcccccatgatgcgaaggtgcgcatgaaggctgtgggtatctgtggcagtgacgtccactatttgaggacattacggtgtgcggactttattgtaaaagagccaatggtgattggtcatgagtctgctggaataattgaggaggttggcagtgaagtgaaacatctggttcctggtgaccgcgtagctttggagcctggaatatcgtgttggcgttgtgaccaatgtaagcgaggctcctacaatttgtgtcccgagatg

SEQ ID NO: 1613 - DNA, 324 bp, Pinus radiata
gctggctacagcttatgccttccgattcgtgggtgaatggatgaaatggctatacttggatgtaacaaaacgtttgggagcaaaggatttctcaacattggctgaagcacatgcatgtactgctgggttaaagtcattgacaacatcagtgactgcggatggcattgaagattgtcgtaagctttgtggtggacatgggtacttgtgcagtagtgggcttccagagctgtttgctgtatatgttcctgcgtgcacatatgaaggagataacacagttctgcttctacaggtagcaagattcttgatgaagacagtccaacaact

SEQ ID NO: 1614 - DNA, 395 bp, Pinus radiata
  misc_feature (53)..(53): n is a, c, g, or t
gttcccaggagaggagagcctcagctgtctcgatctggcgttaaggggttacngaagaagaatttcgaagatggttagatcttcttgctattcaaagcaaggtcataggcgtgggatttggacccctatggaggatatgattctctctgaatacattcgaattcatggcagtgatggatggaaaaatatcgctaaacgagcaggtcttaaacgatgtggaaagagttgcagattaccgttggttgaactatcttcgccccgacattaaacgtggtaacatttctcctgatgaggaggacctcattattaggttgcatggccttcttggcaatcgcaggacgactaccgggtcgaacagacaacgaaatcaagaattactggcacactcatatgag

SEQ ID NO: 1615 - DNA, 231 bp, Pinus radiata
  misc_feature (35)..(35): n is a, c, g, or t
  misc_feature (93)..(93): n is a, c, g, or t
  misc_feature (103)..(103): n is a, c, g, or t
  misc_feature (120)..(120): n is a, c, g, or t
  misc_feature (124)..(124): n is a, c, g, or t
  misc_feature (150)..(150): n is a, c, g, or t
  misc_feature (152)..(152): n is a, c, g, or t
  misc_feature (164)..(164): n is a, c, g, or t
  misc_feature (167)..(167): n is a, c, g, or t
ttacattcaaccaagctcatcacatggcgtccganaaggaagctgctcttgctgccacaccaccagaagatgataaacctacaatatttgacnaaatactgcngaaagagattcccaatncagnggtttacaaggatgagaaggtacttncnttcagggatatngcnccccaagcacctactcacatcattatcatccccaaagtaagggatggcttgactggcctatcta

SEQ ID NO: 1616 - DNA, 396 bp, Pinus radiata
ccggtccgggcggtggagagcatcagccttggagttacagaccaggaaaatacaagatgggtagatctccttgctgctccaaagaggggctcaaccgcggggcctggaccaaaagggaggatatgattctctccgaatacgttcgaattcatggcgatggtggatggagaaatcttccggaaaaagcaggtcttaagagatgtggaaagagttgcagactacgctggtttaactatcttcgtcccgatattaaacgcggaaacatttgccccgccgaggaggagcttattattcggctgcatcgccttcttggcaatcggtggtcactgatagcaggacgactgcctggtcgaacagacaacgaaatcaagaactactggaacactcatcttgagc

SEQ ID NO: 1617 - DNA, 296 bp, Pinus radiata
  misc_feature (62)..(62): n is a, c, g, or t
gtcggcgtcggcggcggctgcgaggaaacggcggcgtcagctgtgaaggaaacgcatttcanaggcgtgaggaagaggccgtgggggagattcgctgcggaaatcagagatccctggaagaagacgagactctggctcggcacttttgacacagccgaagaggccgcccgcgcctatgataatgccgccagaaatctacgcggccccaaggccaaaaccaatttcgctatccacgacgatagcgcccgccctgttcaacagtggcggcggacgcgccgtccctagtcagcgacaag

SEQ ID NO: 1618 - DNA, 381 bp, Pinus radiata
gagctttctctcaagaacattcttacagcaaatgagcagactacaactgcagaacccagaaataataatacagttgttttcctggaatctattactaatccatctgtcagagttgcggatttaccgtctatttccactgtatgtaaaaagtatggagcatttcttatagtagataatacatttgctacaccgataaggatcaagcccatcaagcagggtgctgacatggtcattcattcagtaacgaaatttcttggtggccatagtgatctggttgcaggagtagttgcaggctcttctcaccacatagagttagcctcaaagctggtaggtcgctgggggctgcttgctgctccattcgattcatggcttgccactcgc

SEQ ID NO: 1619 - DNA, 373 bp, Pinus radiata
cggtccatgtgacttcgacatccatgagtcctgcgcccaagctcctaacgccactctccattcctgtcatccccagcatcctctcgtgttgagggacaaaccagtttcaccacaacgcgtatgcgacgtctgtggaagggatgttttaggattcgtttatgactgccgtgaatgtgacgtggacgttcatccctcctgtgcacagctgccgcagacgctgcgccacgctctgcatccacaccacacccttcaactctcccatggacctgaagctcccgcccctcctgcacgctcctgtaacgtatgcggagaagcctgtagccctgggcactggagctatcgttgcgaattagccagtgcgccgtgtgatttc

SEQ ID NO: 1620 - DNA, 137 bp, Pinus radiata
cacgggttccagaccttttgcatcttcattattcttccgcctgtgaaaagatggggagatctccgtgctgtgagaaggctcatactaacaaaggggcctggactaaacaagaagatgaccgccttatcgctcacatt

SEQ ID NO: 1621 - DNA, 372 bp, Pinus radiata
gttcccaggagaggagagcctcagctgtctcgatctggcgttaaggggttacagaagaagaatttcgaagatggttagatcttcttgctattcaaagcaaggtcataggcgtgggatttggacccctatggaggatatgattctctctgaatacattcgaattcatggcagtgatggatggaaaaatatcgctaaacgagcaggtcttaaacgatgtggaaagagttgcagattacgttggttgaactatcttcgccccgacattaaacgtggtaacatttctcctgatgaggaggacctcattattaggttgcatggccttcttggcaatcgcaggacgactaccgggtcgaacagacaacgaaatcaaag

SEQ ID NO: 1622 - DNA, 464 bp, Pinus radiata
ctgaattgcatttcttagtcggcaaaaatattaaagagtcaagacaaagagggggttacgggagcaggctgcgggttcgatcccaagataaggaaaaaagaaagaaaatttcatgaattgggcctgtagattccagtcacgaaattaaaacctatcggtctcgtcttcgagctaaagttggggaaaaagctaagctctcagggaatgggttcccgcacaatgctgtcctctaatggtggccggacacctcagttccaaccactcgttcgtcagaattctttatacaatttaacgctggaggaggtccagaaccagctcggggacgccagcaagccacttagcagcatgaacatggacgagctcctgaagaacatttggacacaagagaaagccaggctatatccatggcgatcggcaatgggcccatgaacggtgttcctcccaactctgcccctgccagcggt

SEQ ID NO: 1623 - DNA, 436 bp, Pinus radiata
aagaaaaatgggctgaatagtctcagggagggttttaaattgaatgagtaggtttttctggggtgagattctttcatatttatgcgtaaaacgttgactccaatcggcgtgaaacaaaccaatagaaatcccaaattgatttctttcaatttcatctgatacacagagagaattcagtcagtggaagtcatgtctaacataacgtctgcctctggagaggccagcgtttcttctggcaatacagctgccatggctgatagtgagagcattcggcaacagccaccacaacaattctcaacaccaacgtctgcaaatggcgccggaaatataaacagtgctcagcaaaacccagagaagaagagaaagagaaatcttccaggaactccagacccagatgcagaagtgattgctctgtcgcctaggactctcatggcta

SEQ ID NO: 1624 - DNA, 337 bp, Pinus radiata
gccagagctgtggctgttcccagaagaggatatcatcagctgtccagtttgtcctaagagactacagaagaagaatatagaagatgggtagatccccttgccccccaaaagaagcgcttaaccgtggggcttggacaggcatggaggatacgattctcaccgagtacattcgagttcatggcagtggtggctggaaagatatctccaaaagagcaggtcttaagaggtgtgcaaagagttgcagattgcgttggctgaactatcttcgtcccgatattaaacgtggtaacatttctcccgaggaagaagagctcattattcggttgcatcgccttct

SEQ ID NO: 1625 - DNA, 421 bp, Pinus radiata
ctgaagtgccgtcgattgttcgggaggatagcgttttcgaagttcgttgttgagttatctcgcgagactgtagaattttagggttgttttccacaaaccgacttttcccgacttcaaatcttgatattgaagtgacatggccggcgagaaaagaaagattaatagaatagctaacgcttcggccaggcaggtcaccttcgcgaagaggcggagggggctgttcaaaaaagctcaggagctatcgattttatgcgaagccgatgtagccctcctcgttttttcttcaactggaaagctgtaccagtactccagctccagcatgaaaatgatattggaccagtatattttgtattctagatcaattcaaaaggatggaaagccaaatctggaggagagtcacgatatccaaaagataaaccac

SEQ ID NO: 1626 - DNA, 315 bp, Pinus radiata; identical to SEQ ID NO: 515

SEQ ID NO: 1627 - DNA, 373 bp, Pinus radiata
cacatccatacatgtggggtggacagccgttgatgccaccttatgggactccactaccatatcctgcaatgtatccacatggaggaatctatgcacatccttccatgcctccgggtgcacttccgtatggtcactatggaatgccatcacctggcaatgctgaagttacaacgactttagcacttccaaatgctgaagcagaagccaagtcctcggaaggcaaagagcggaatacaatgaagagatcaaaaggaagtttaggaagccttggaatgattactggcaaaggaggagaaggtggcaaggcaacatcgggatctgcaaatgaggccatgtcacaaagtggggacagtggcagtgacggttcaagcga

SEQ ID NO: 1628 - DNA, 512 bp, Pinus radiata
cggtaatagcatagagggattatacagaggtggattgttattgaaacccagtagtggaggtagagtcttgacaagttgggacaaaggagggaattccacggatgttatagatatggatatagggactgggagactaacaggttctgaaaggagacatgacaaacggaatcctacatttacagaccattatagacattcagacagtgatcgaatgaagatgaacagctacttatatccagaaaacaacaatagcacggcgcttgttgcgtctctgtttgttcccaggaacgacaaacttgtaaagattgatggcaaccttataatccatgcagttctagctggggaaaaagcctcgagagcattatctgcctcacagtctagaggcaacaaagatgggcatgtagacaccatttcacttcaaaaggaatatgaaaagaatagtttggcagtcagaacagaaaggcatcgtgctcttgctgctgctgccgccgccactacagattcagccagaa

SEQ ID NO: 1629 - DNA, 395 bp, Pinus radiata
gagaaaacggacctgaccatatcgaaacattcacagggggagattgatcaaacacaaataccgtaaaatcgcagcgaaaatccaaaattccaccatggggactgtggcggaggatggcagcaagggttacaaggccgtaaatccccatcccaaaaagggcgtcgcctcgtggctggtggacatggtggagaaactggtggttgaaacttctgcgttgtatagttcgaagaagcctctgcattttcttttggggaacttcgctccagtctcggaaactgcccccaaatcgcacctgcctgttgttgggcaacttcctagttgcttggatggagagttcgtgcgcgttggtcccaatccgaaattcgcaccggtagctggctatcactggtttgatg

SEQ ID NO: 1630 - DNA, 285 bp, Pinus radiata
ctctgcattttcttttggggaacttcgctccagtctcggaaactgcccccaaatcgcacctgcctgttgttgggcaacttcctagttgcttggatggagagttcgtgcgcgttggtcccaatccgaaattcgcaccggtagctggctatcactggtttgatggagatggaatgatccatggtctcagaattaaagatggtaaagccacatatgtgtcacgttatgtgaagacatcacgcttgaaacaagaggaatactttgggaaagcaaaattctttaagattg

SEQ ID NO: 1631 - DNA, 438 bp, Pinus radiata
gtttttcaaagctcaggtttaacagaaaatacccgggaaaattaacaagaaaaaaggaaaaacagagattttgtttatttctgttattagtctgctaaattggtttttgataatttaattaattaaggcgggggcccgcacctccaggcagtggcggagaccagtgggcggccctgccacccgaggaggagagccgcgtgcgctttctcgacttcgaacccgcggctatggaggcgctggatcaggtactctgcctgcgtctcggtgaagttgctgaaggccactggggagaagccggcggcggcgaacagggtcttccatggcggagccggcggcggaggaaatggtggcgtcgatcttcggagctagcaggaacttctcgatcttgtgcacggcctccatgttgatgttcacggcatccagtgaatcgaacaggaa

SEQ ID NO: 1632 - DNA, 457 bp, Pinus radiata
ccatatcgaaacattcacagggggagattgatcaaacacaaataccgtaaaatcgcagcgaaaatccaaaattccaccatggggactgtggcggaggatggcagcaagggttacaaggccgtaaatccccatcccaaaaagggcgtcgcctcgtggctggtggacatggtggagaaactggtggttgaaacttctgcgttgtatagttcgaagaagcctctgcattttcttttggggaacttcgctccagtctcggaaactgcccccaaatcgcacctgcctgttgttgggcaacttcctagttgcttggatggagagttcgtgcgcgttggtcccaatccgaaattcgcaccggtagctggctatcactggtttgatggagatggaatgatccatggtctcagaattaaagatggtaaagccacatatgtgtcacgttatgtgaagacatcacgct

SEQ ID NO: 1633 - DNA, 318 bp, Pinus radiata
aattgttgataatcagattccattgagtggacctgattcagttattggtagggcacttgttgtccatgagttagaggatgacctggggaaaggtgggcatgaacttagtctgacaactggcaatgctgggggcaggttggcttgtggtgtggttggactcactcccatttaaggcccagtcaaatatggaatgatcttcaaaggtcatggacatcgtatgaaaccagtgactgcaataataattccaaaatatatgttctttatcctcgcaagattgttagcaattgtgatttgtttttggtattaacgagttgcact

SEQ ID NO: 1634 - DNA, 211 bp, Pinus radiata
gccgtggctgttcccaggagaggagagcctcagctgtctcgatctggcgttaaggggttacagaagaagaatttcgaagatggttagatcttcttgctattcaaagcaaggtcataggcgtgggatttggacccctatggaggatatgattctctctgaatacattcgaattcatggcagtgatggatggaaaaatatcgcttaacgagca

SEQ ID NO: 1635 - DNA, 350 bp, Pinus radiata; identical to SEQ ID NO: 530

SEQ ID NO: 1636 - DNA, 356 bp, Pinus radiata
ggttgctggattccaacggaaaggatttgcctctttcatcagtctataatcgaggatctctgcagtcctttactagtgaaggtcattccgtttcaacagtaatcctccgtattgaaaaggaggaagaagagtttgtctttgttgacattcctgaaagaccaattccctctctactacgcaattatagtgctcctgtgcgtcttgtttcagatatcactgatgatgatttgtactttctacttgcacatgattcagatgagtttaaccggtgggaggctggccagacattggcaagaaaactcatgctctctctcgtagataaggcgcaacagaatcaaccattgagtgtggaccca

SEQ ID NO: 1637 - DNA, 362 bp, Pinus radiata
cgaggctccgttcaacccctttcatcttcaatcgttccaaggcctcttcggtctgcctgggtgcgtttctgaatttctcgccaagtgagtgagtcgatccagccttgtttcagcgaaacctgttgtggttttgggttttcttggcttttgccttttcattctttgtttccttggattcgaactcgagatctcctgaatattatggcacaggagagctggaaccaggaggagaccgggtgccaagtcccggaagggctcatgcgctgtgccaacaactgtggcttcttcggaagtccggccaccatgagtctctgctccaagtgttaccgcgaattcgtgctgctcaactcccctaaatcgtc

SEQ ID NO: 1638 - DNA, 359 bp, Pinus radiata
cgaaactcgaatcgatatgctttgtggccggttcaaatatttgagctggcttagcttctctggttcagaaatggcggactaaagtaatagtgtgccccgaggtctggtgttcgaatctcgttggcgtgaaaggtcaaatttttctctcgagtttcattgattctgaaaaactggcatagctatggcgatgagcaatgggagattgtgtgaagatttggataggattaaggggccgtggagccccgaggaggacgcgtcgctgcagaggcttgttcagaaatacgggccgaggaactggaccctgataagtaaaggaatcccggggcgatccgggaaatcgtgcaggctacggtggtgca

SEQ ID NO: 1639 - DNA, 299 bp, Pinus radiata; identical to SEQ ID NO: 525

SEQ ID NO: 1640 - DNA, 300 bp, Pinus radiata
gaaactatgaaccgcgcataaaatcgaaggcgaggagtgctagaagaggcggtgaagttgaagttgttatggggggaattatgctggtcgggtcgacgatgattcctgcgggcggcgcggcggcagcggcggagacgtcggtggaggaaggaggagaattgaataagatcgaaagccctacaccatcaccaagtccagagaaagctggactgagcaggagcacaacaaatttctgcgaagctatgcagcctgtttgatagggactggaagaagaattgaagcatttggttggttcacaag

SEQ ID NO: 1641 - DNA, 311 bp, Pinus radiata
gttcagctgttcgcaaagcacggagcgaaagtcataatcgcagacgttgcagagaaagctggcagaaagcttgcagaatccctttctccagcatcggcaacttatgtgcactgtgatgtcagcaaagaagaagacgtgagcgcggctgtggatctggctatggataagtatggtcaactcgacattatgtataacaacgctggaactaacgacagctttctggtgaagagcgtggcagagtatgatatggagcaattcgatcgagtgatgaacgtaaacctgaaaggagtgatgcacggcattaagcacgc

SEQ ID NO: 1642 - DNA, 350 bp, Pinus radiata
agggatcaggcaacgtccatgggggaaatgggctgcagagatcagggatcccagaaaaggcgctagggtttggctgggtacctttaatacggcggaggaagctgctcgggcttatgatgcagctgcacgaaagatcagaggtaagaaggcgaaagtaaattttgttgatgagccaccaccctccgttaagaaggaaagtaataatgctaagggttccaagaaagggtccagcaagaaaataaaatcatatctaccccaaagcctgactttttcgaaggtttcaaaacggcgaacccttcgattgcccaatacaacttccatcagaaattcccaaaccctaactgtgatga

SEQ ID NO: 1643 - DNA, 322 bp, Pinus radiata
gacttttgctccgaactgttctgctgaaacaaaatccagtattgagctaggtttagaatcgggtttgctggtcatctgggagaggcgatccattcagcttcgcaggcccccgaagatggcgttcgccggcacaacccagaagtgcaaggcatgtgaaaagacggtctatttggttgatcaattgacagctgataattctgtttttcacaaatcctgtttccgctgccatcactgcaatggaactttaaagcttagcaactattcgtcgtttgagggagttctatattgcaaacctcattttgaccagctgtttaagagaaca

SEQ ID NO: 1644 - DNA, 345 bp, Pinus radiata
gccgaaactcgaatcgatatgctttgtggccggttcaaatatttgagctggcttagcttctctggttcagaaatggcggactaaagtaatagtgtgccccgaggtctggtgttcgaatctcgttggcgtgaaaggtcaaatttttctctcgagtttcattgattctgaaaaactggcatagctatggcgatgagcaatgggagattgtgtgaagatttggataggattaaggggccgtggagccccgaggggacgcgtcgctgcagaggcttgttcagaaatacgggccgaggaactggaccctgataagtaaaggaatcccggggcgatccgggaaatcgtgca

SEQ ID NO: 1645 - DNA, 508 bp, Pinus radiata
cgtgtcaaagcccaaacgacccgtttcaacgcttataacatattatgtgagtatcggagtggaaaggcagcaccgagaaacatatccgaggagaaagtatactcatatattaacgtaacggaaaatggaaataatgatgatcaaggcaaaggtattacagaggtccatcctcatcccaagaaaggcatcctttcatcggtaattgatttggccgagaaaatcgtggttcgctcgctctacggctccgccaaacctctgcactacctcgctggtaatttcgcaccggtcgaacaagaaactccgccgcacacagacttgtccgtcattggaaatctccctaaatgcttggatggagaatttgtgcgagtcggtcccaatcccagattttgcccccgtcgctggctatcattggttcgacggagaccggaatgctcatggtttgaggattaaagatggcaaagcagcttatgtttcgcgtttccgtcaaaacttcacgtctcaagcaaga

SEQ ID NO: 1646 - DNA, 368 bp, Pinus radiata
tggctcttcccggcagacctagtaagccgactactgtaaatttattcttttagggttacagaaaaagaaaatacaagatgggcagatctccttgctgctcaaaagaagggctcaaccgtggggcctggaccaaaagggaggatatgattctctccgaatacattcgaattcatggcgattgcggatggagaaatatgcccaaaagagcaggtcttaaacggtgtggaaagagctgcacgattacgatggctgaactatcttcgccccgacattaaacgtggaaacatttcccctgatgaggaggaactcataattcggctccatcgccttcttggcaatcgatggtcgcttatagcattgaagattac

SEQ ID NO: 1647 - DNA, 367 bp, Pinus radiata
  misc_feature (325)..(325): n is a, c, g, or t
cttcccttcatcagatgtttcccaggctgcactcatcagctgcagcaccacgcggttttggattctccctgttctttgttctgttgcgttaaagattggttgcaggtcgaatcgcccaggccgatttgaattctcctgaggattgacaagatgacgcgcaagtgctcgcactgtggcaacaacgggcataactccaggacgtgccctaaccgcggcggggtgaagctcttcggcgttcggcttaccgatggcccgatcagaaagagcgctagtatggggaatttgatgatgatgtccaaccctagctctcccgctgacccctccnagccggcctctgccgcttctgctgccgcggcggcggcggcca

SEQ ID NO: 1648 - DNA, 511 bp, Pinus radiata
gtggctcttcccggcagacctagtaagccgactactgtaaatttattcttttagggttacagaagaagaaaatacaagatgggcagatctccttgctgctcaaaagaagggctcaaccgtggggcctggaccaaaagggaggatatgattctctccgaatacattcgaattcatggcgatggcggatggagaaatatgcccaaaagagcaggtcttaaacggtgtggaaagagctgcagattacgatggctgaactatcttcgccccgacattaaacgtggaaacatttcccctgatgaggaggaactcataattcggctccatcgccttcttggcaatcgatggtcgcttatagcaggaagattaccaggtcgaacagacaacgaaatcaagaactactggaacactcatatgagcaagaagctgcttccattgaacgaatctcaacccaagactttgcctgtccccaagaggaggtcgcaatctccttctcccctgcaaaatcgagtct

SEQ ID NO: 1649 - DNA, 364 bp, Pinus radiata
tgcgcctccatccgaccaaacaagtgggggacatgcatattgcaagtgtggagaacactgcagctgcaatccatgtaactgttcaaagattgacgagactgttagtgggaaatccttctgtaaatgtggagagaattgcgcctgtgaaacatgcacctgcagcagagctggaatatagcctagttgattgtttttctcagccagaacttaggattccatgaccactagtaataagatgcagtatcaatagcagctgatgtttatgtatgcagtaagtttataaaagagagtggttactttttggctttagtaatttggtgcttatgttatgtatgtagtaagtttatctccaaatacagagccg

SEQ ID NO: 1650 - DNA, 354 bp, Pinus radiata
caagagtaaacccgaaggaatagaaggggaaggaggcatcggcagcgttgttcctcctcctctcctctcctgcatttctcaaactcaaatacctctcctctcacatcatggaaggcggagtcgtctttgaatctgtgcaaaacccactggatcgcctgaacactggaaatatggaccatggttgtgcccattacaggagacgatgtcggattcgggccccttgttgcaatgagatctatgattgtaggcactgtcacaatgaagccatgagccatctaaaggaccccttgctgcgccatgagctcccaagatacaaagttgaacgggttatttgttctctctgtgacactgagc

SEQ ID NO: 1651 - DNA, 424 bp, Pinus radiata; identical to SEQ ID NO: 512

SEQ ID NO: 1652 - DNA, 422 bp, Pinus radiata
gtcaatgctgcccgtcgaactggaggccctattgaaactatcaagaaatttaatgcaggatcaaacaaagcagcctcgagcagcaccaccttgaacaccaagaagcttgatgatgagacagaagttctcgctcatgaaagagtttcatcagatttgaagaaaaacataatgcaagcccgtttagataaaaagttgacacaagcccagcttgcacagcaaatcaatgaaaaacctcagattattcaagagtaccgagtccgggaaagcaattcccaatcagcagatcattgccaagctggaaagggtccttggtgtgaaactgcgtggaagcactggaagtggaaagaaataactggaagtatgcaatagcaataacatgtcatagagttgtgtgatttggcgttcaccacccacacctgctt

SEQ ID NO: 1653 - DNA, 357 bp, Pinus radiata
  misc_feature (2)..(2): n is a, c, g, or t
gnacgagctcgatctggccttaaggggttacagaagaagaatttcgaagatgggtagatcttcttgctattcaaagcaaggtcatagccgtgggatttggacccctatggaggatatgattctctctgaatacattcgaattcatggcagtgatggatggaaaaatatcgctaaacgagcaggtcttaaacgacgtggaaagggttgcagattacgttggttgaactatcttcgccccgacattaaacgtggtaacatttctcctgatgaggaggacctcattattaggttgcatggccttcttggcaatcgatggtctttgatagcaggacgactaccgggtcgaacagacaacga

SEQ ID NO: 1654 - DNA, 306 bp, Pinus radiata
gcgcattgttcagctgtgtcgcagaacacggagcgaaagtcataatcgcagacgttgcagagaaagctggcagaaagcttgcagaatccctttctccagcatcggcaacttatgtgcactgtgatgtcagcaaagaagaagacgtgagcgcggctgtggatctggctatggataagtatggtcaactcgacattatgtataacaacgctggaactaacgacagctttctggtgaagagcgtggcagagtatgatatggagcaattcgatcgagtgatgaacgtaaacgtgaaaggagtgatgcacg

SEQ ID NO: 1655 - DNA, 368 bp, Pinus radiata
cttcagtttgccattgaagaccaataaataattattgtgaagcagcagcgttttaatcagagatccagcaagaagaggaccaggaaaaatcatttgcagaacaagaagataatccaagatgtcaagcacacgcagccctcagtgtgggtgcggagaaacttgcgcttgcgccgattgcaagtgtggagttgtgagtattgcgcctccatccgaccaaacaagtgggggacatgcatattgcaagtgtggagaacactgcagctgcaatccatgtaactgttcaaagattgacgagactgttagtgggaaatccttctgtaaatgtggagagaattgcgcctgtgaaacatgcacctgcagcagagctg

SEQ ID NO: 1656 - DNA, 333 bp, Pinus radiata
ttgaattcttgtcttccccccagctgaggctctctgagaccaaggtgagattcagccagtagtaagctatagattgatagttcagagaaaagactgaaaggcaaaaactatatagacataacaacggagagagcagcacaggaaccaggttgcataatggctaggcctcaaagatacagaggagtccgtcagaggcactggggatcatgggtctctgaaatccgccatcccttattgaagaccagaatatggctaggaacatttgaaacagcagaggatgcagcacgagcatatgatgaagctgcaaggatgatgtgtgggccgagagctaga

SEQ ID NO: 1657 - DNA, 355 bp, Pinus radiata
gttccccgtctcctccgtctgctaggcatttctctgcgattcttcttcttctgctcggggtctctctggtgaaatcgtccccgcaggaggagggctgagggcagggctcggctcggctcggttcgtttcggcaggagttatctcagggtttttctcttgattttctgcgccttcggactcgggcttacagttacagcatctggaaaatggcgtcacaggagagctcaaaaatgcaagaggaagggagtgggagacaagtgccggaagggcccattcactgtttgaacaactgcggcttcttcgggagcgcggccaccatgaacttgtgctccaagtgctacagagagcttaacgc

SEQ ID NO: 1658 - DNA, 341 bp, Pinus radiata
ggggaatgattcctggccgaggccattcgagcgccatacacattgcggcggactgcgggaagtattgttttcagtaattcccttaattgggtcccagaatacgttctcagatccgaaaacggttcagtccatcggaggttacagcgattcgaaggcctgaaaaccctaaaaatacctatccccctttgtctttgaatggcggagaactatggcagcccggatagcagcccccggtcggagaacgaatccggcggcggtcacatgggcggcagcgatttctctgtgaaagagcaggatcggttcctgcctatagccaacgtggggcgcataatgaagaaggc

SEQ ID NO: 1659 - DNA, 353 bp, Pinus radiata
gaaaaacaaagcagaaagccaccatgtggtagaggaggtgctgaggataaaggagcttcttgatgattcttatcagcctcaggaagtcttgctagagtcactgcagagtttgtttaacatgcatatttctgtggaggctttgaaggagactgatattggtagacaagtgaatggactgcgaaaacattcttctgctgacattcgaaagctagtaaaagagctcataaggaagtggaaagatcttgtcgatgagtgggtaagcactgcagatgaagttgcagctgctgcaattgttgatggagattctccacaaggtggtggcagcagaatttctcaacagagtattgtgcaga

SEQ ID NO: 1660 - DNA, 317 bp, Pinus radiata
caagagtaaacccgaaggaatagaaggggaaggaggcatcggcagcgttgttcctcctcctctcctctcctgcatttctcaaactcaaatacctctcctctcacaatcatggaaggcggagtcgtctttgaatctgtgcaaaacccactggatcgcctgaacactggaaatatggaccatggttgtgcccattacaggagacgatgtcggattcgggccccttgttgcaatgagatctatgattgtaggcactgtcacaatgaagccatgagccatctaaaggaccccttgctgcgccatgagctcccaagatacaa

SEQ ID NO: 1661 - DNA, 340 bp, Pinus radiata
caatggcggcccagactatcatcgctgcctctatggcatctcctctaacattatcaaatggccactatccgtttcagtccgagttcaaggggtccgtggttcgaatcccgcagagggcattttccttcgcgcctgcagcccgggcgctgaccgtcgtcgcagaggccaagaaggccgttgccgtgctcaaagggaattcacaggtcgagggtgttgtcagtctctcgcaggaagacagcggtcccacaacagtgaaggtccgtttgacaggactgactcctgggaagcatggctttcatctacatgagtttggtgacacaaccaatggctgcatatcaac

SEQ ID NO: 1662 - DNA, 563 bp, Pinus radiata
ttcggttcgtattcagggtttcgggagcttgttgtgtggtgttctgcaggtcaggacattgtaggcctggttatacaagatttcgaagcaaactctcggagcctcgaagaatcggcgcaaatttcaacggccttataactatttgggaagcagtactctggatttttctcccggaacggatcggagtgtgcgaagcgtaataatcgcctggaatttgtcttctgcaagataatattcaattaatctattgtcgaaggaaatttgagccgtataagaggataatcaaaagaagccggttgatttctccgggattaaaggatggatcaagaaaactggaacatcggagctgatggcactggctgccaactccagaagggcacactctttgcgccaataactgcggcttttttggcagttcggcaacgagaaacctgtgttcgaaatgttacagggatctgattatgaaggaggcccaagcctcatctgcaatggccgccgttgagaagtcatttgccgcgggttctccgatggaggaggaggcccctctttccaagccagatgtt

SEQ ID NO: 1663 - DNA, 572 bp, Pinus radiata
cagcaatggcggcccagactatcatcgctgcctctatggcatctcctctaacattatcaaatggccactatccgtttcagtccgagttcaaggggtccgtggttcgaatcccgcagagggcattttccttcgcgcctgcagcccgggcgctgacagtcgtcgcagaggccaagaaggccgttgccgtgctcaaaggaaattcacaggtcgagggtgttgtcaatctctcgcaggaagacaacggtcccacaacagtgaaggtccgtttgacaggactgactcctgggaagcatggctttcatctacatgagtttggtgacacaaccaatggctgcatctcaacaggagcacattttaatccaaaaaaattgacacatggtgctcctgaggacgatgtacgccatgcgggtgacctgggaaacatagttgcgggttctgatggagttgcagaggcaacaattgttgataatcagattccattgagtggacctgattcagttattgggagggcacttgttgtccatgagttaaaggatgacctggggaaaggtgggcatgaacttagcctgaca

SEQ ID NO: 1664 - DNA, 366 bp, Pinus radiata
atcgcttcggcccgagcaattttgcttctctgctaaacgatgggaagagcgccttgctgtgccaacggtgacagaagcaagggagcctggaccaaggaagaggatgacaggcttacccaatatattcaggctcatggagaaggatgctggcgttctctccccaaggccgcaggtctgcttcggtgtggaaaaagttgcaggctgagatggataaattatcttcgccctgatctgaaacgaggaggtttttctgaagatgaagacgatcttattctcaaactgcacgccctcctcggaaataagtggtctctgatagcgggtcgtttgcctggtcgaactggccaccaaaatcaaaactactggact

SEQ ID NO: 1665 - DNA, 348 bp, Pinus radiata
  misc_feature (102)..(102): n is a, c, g, or t
gcatcttgctcgtgactgcaccaacaacccagtttgtaatttgtgcaatatatctggtcatgtggccagggagtgccccaaggctcgcattttggatggtantaggggtggaagatttattgacgataggcgtggaagatttaatgacataatctgtaggacatgcaacgagccagggcataccagtagggagtgcactggaattctcatctgccacaactgtggtggccgtggacatgttgcatactaatgcccctctggtcgtgtgatgctgcgggacatgcgcaggcattgatgctgcaatttctacaacaccttgactttttagattatctgattttgacaaat

SEQ ID NO: 1666 - DNA, 422 bp, Pinus radiata
agagagaagggtgttccctggactgaagaagagcacaggcagtttttgatgggccttcgcaagtacggcaaaggcgactggagaagtatttctagaaactttgttgtgtcaaggacaccaacccaagttgccagccatgctcaaaagtactacattcggcttggttcggataataaaaacaagagaagatccagcatacatgatatcaccactgttcatggtacagacaggatgccttctcctttactgcacgtttctaataggcagactaattccccctcaacacaggcagaaatgaatcattcaccatgtctgacatatccatctcagatttcacgaggacctctaataaactctttgggacctcaaatagatggtaaccttctattttcacctcactatcctctaaatctgtataccca

SEQ ID NO: 1667 - DNA, 467 bp, Pinus radiata
cttgttgtgtggtgttctgcaggtcaggacattgtaggcctggttatacaagatttcgaagcaaactctcggagcctcgaagaatcggcgcaaatttcaacggccttataactatttgggaagcagtactctggatttttctcccggaacggatcggagtgtgcgaagcgtaataatcgcctggaatttgtcttctgcaagataatattcaattaatctattgtcgaaggaaatttgagccgtataagaggataatcaaaagaagccggttgatttctccgggattaaaggatggatcaagaaaactggaacatcggagctgatggcactggctgccaagctccagaagggcacactctttgcgccaataactgcggcttttttggcagttcggcaacgagaaacctgtgttcgaaatgttacagggatctgattatgaaggaggcccaagcctcatctgcaatggc

SEQ ID NO: 1668 - DNA, 465 bp, Pinus radiata
tccagatgttcgtggtagacatgaaattttagagctttatttgcaaaataagcctctggctgaagatgtgaatgtgaaagcccttgctcgtggtacacctggtttcaatggtgcagatttggcaaaccttgtcaacattgcggccatcaaggcagcagttgatggcagtgagaagttgtctgccaaacatctggaatttgcgaaggatagaataatgatgggaacagaacggaagtcgatgttcctatcagaggagtcgaaaaagctcactgcataccatgagagtggacatgcagttgttgcatttaatactgtaggtgcaaaccctatacacaaggctacaatcactcctcgagggagtgctcttgggatggttacacagctgcctgacaaggatgaaacatctgttaataaaacgcaattattagcacgacttgatgtttgtatgggcggacgagttgcaga

SEQ ID NO: 1669 - DNA, 421 bp, Pinus radiata
cgaaccatggagtctaagggacaggctaatccatctgttgcttctgtttgtaatctcagcaagaatggagagcgacgattggaagggaaagttgttatagtaacgggcggggcagcgggcataggagaagccattgttcagctgttcgcaaagcacggagcgaaagtcataatcgcagacgttgcagagaaagctggcagaaagcttgcagaatccctttctccagcatcggcaacttatgtgcactgtgatgtcagcaaagaagaagacgtgagcgcggctgtggatctggctatggataagtatggtcaactcgacattatgtataacaacgctggaactaacgacagctttctggtgaagagcgtggcagagtatgatatggagcaattcgatcgagtgatgaacgtaaacgtgaaag

SEQ ID NO: 1670 - DNA, 445 bp, Pinus radiata
ccatatcgaaacattcacagggggagattgatcaaacacaaataccgtaaaatcgcagcgaaaatccaaaattccaccatggggactgtggcggaggatggcagcaagggttacaaggccgtaaatccccatcccaaaaagggcgtcgcctcgtggctggtggacatggtggagaaactggtggttgaaacttctgcgttgtatagttcgaagaagcctctgcattttcttttggggaacttcgctccagtctcggaaactgcccccaaatcgcacctgcctgttgttgggcaacttcctagttgcttggatggagagttcgtgcgcgttggtcccaatccgaaattcgcaccggtagctggctatcactggtttgatggagatggaatgatccatggtctcagaattaaagatggtaaagccacatatgtgtcacgttatgtga

SEQ ID NO: 1671 - DNA, 460 bp, Pinus radiata
cagacttttgctccgaactgttctgctgaaacaaaatccagtattgagctaggtttagaatcgggtttgctggtcatctgggagaggcgatccattcagcttcgcaggcccccgaagatggcgttcgccggcacaacccagaagtgcaaggcatgtgaaaagacggtctatttggttgatcaattgacagctgataattctgtttttcacaaatcctgtttccgctgccatcactgcaatggaactttaaagcttagcaactattcgtcgtttgagggagttctatattgcaaacctcattttgaccagctgtttaagagaacaggaagtttggataaaagttttgaagccattcctagagcatcaagaaatgacaagatgcatgagaatgagaacaggacacctagtagggtatcagcattgttttccggtacacaggataaatgtgttgcatgtggga

SEQ ID NO: 1672 - DNA, 301 bp, Pinus radiata
ttgttggtgggagacggagaacattgctttgttaaattggtcagcgggtttgcagctgaatccgaggctgttgcatccttaaaagtgttttacctttgtggtttggaccttagggtttgaactctttaaagaaactctcaaaatcagccttaaacaataacatacaagatgtccattctaccccaaagcgattccctcataataagggaagtttgggcagataatctggaggaggagtttgctttgattcgggaaattgtggacgattacccttatattgctatggatactgagtttcctg

SEQ ID NO: 1673 - DNA, 321 bp, Pinus radiata
aacacaaataccgtaaaattgcagcgaaaatccaaaattccaccatggggactgtggcggaagatggcagcaagggttacaaggccgtaaatccccatcccaaaaagggcgtcgcctcgtggctggtggacatggtggagaaactggtggttgaaacttctgcgttgtatagttcgaagaagcctctgcattttcttttggggaacttcgctccagtctcggaaactgcccccaaatcgcacctgcctgttgttgggcaacttcctagttgcttggatggagagttcgtgcgcgttggtcccaatccgaaattcgcaccgg

SEQ ID NO: 1674 - DNA, 380 bp, Pinus radiata
cctgttcgatatcactgctgaacctatcagttgtccattaccttcgcctgccttgcctgtattgtcatcacagtcggcctctgatcaagaagaagccgaatcaggtgataattctgcaaattctgcagatgtagaaactcttcttcctcaggttgatgaaacagcttctgctgatctgacagtgttcccaggttttgttaccccttatgtaccatacgggttccccatatggcacacttttagacccacaataactcaaacttccaatgtttataagccaacagctgtaatgccaactgctccaataaaaatggacgaatgcacagggttatcccagttaagcctcggcggtgttgcagcggcttctgcaatgaaaccct

SEQ ID NO: 1675 - DNA, 350 bp, Pinus radiata
cccagctgaggctctctgagaccaaggtgagattcagccagtagtaagctatagattgatagttcagagaaaagactgaaaggcaaaaactatatagacataacaacggagagagcagcacaggaaccaggttgcataatggctaggcctcaaagatacagaggagtccgtcagaggcactggggatcatgggtctctgaaatccgccatcccttattgaagaccagaatatggctaggaacatttgaaacagcagaggatgcagcacgagcatatgatgaagctgcaaggatgatgtgtgggccgagagctagaaccaacttcccattcaatcccatgcacctccatct

SEQ ID NO: 1676 - DNA, 262 bp, Pinus radiata
aagtgagcttcatatctaaccaataataacacctgtatagcttcacagcaacagggcaccatgggccgagctcttgctgtgataaaatgggagtaaaagaaaggcccctggactctaacgaagataaaatactggtcgactacattaccaaacatggccatggcaactggcgtgcactgcccaagcaagcagggctcctgcgatgtggaaagaagttgtcgcctgcgggggacgaattacctgaaacccgacatcaaaagag

SEQ ID NO: 1677 - DNA, 357 bp, Pinus radiata
cgacaatggcgcggacgggattcgaaaccgcgacgctcggcctcgaacgtaccgaggcgttcgccgccggagctgggggaagtgggtgtccgagattcgcgagcctgggaagagaaagcgcatatggttgggatccttccaaacggcagagatggcggctcgagcttacgacgtggctgcgctcagcctgaagggaagatctgctttgcccaatttcccggattccgtccacacgctgccgcgcccctcttctctgaatcccagagatatccagcttggcggctgcccaggcagccgcgaattaacgcagccgatggtctctaccgatatttcatcctgcaaccgcaagatcaaaat

SEQ ID NO: 1678 - DNA, 354 bp, Pinus radiata
  misc_feature (312)..(312): n is a, c, g, or t
cacgaggcagtatctaccaatgtcggggagagacaggaagcttgttgtgcttggtattccttgggatgtcgacactgaaggtttacaggattatatgagcaagtttggagaactggatgatgtgattgttatgcgggatcgtgcaactggtcgttctcgtggatttggttatgccacattttcttcagttgaagatgctaagaaagcacttgacagtgaacatgttctaaatggtcgtacactggaagtaaaggtggctacacccaaggaggagatgaaggctccttctaagaagattacccggatatttgnggcaaagaattcccccttctgttacagaggatgcattccgaa

SEQ ID NO: 1679 - DNA, 174 bp, Pinus radiata
gtccgggcggtggagagcatcagccttggagttacagaccaggaaaatacaagatgggtagatctccttgctgctccaaagaggggctcaaccgcggggcctggaccaaaagggaggatatgattctctccgaatacgttcgaattcatggcgatggtgtatggaaaaatgttg

SEQ ID NO: 1680 - DNA, 221 bp, Pinus radiata
gttcattaagcatggagccaaagtcataatcgcagacgttgcggagaaagttggcaggaagcttgaggaatcactttctcccgctgtggcaacctacgtgcactgcgatgtgagcaaagaagaagatgtgagcgcggcggtggatgtggccatggataagtatggccaactggacattatgtataacaacgctggaactaatgacagatttttggtgaaga

SEQ ID NO: 1681 - DNA, 363 bp, Pinus radiata
gcttaggcgcattaaggagcaaaggaagggaaaatatcacagcgacacagcaaaacagagacagtcacaagaacaagcccgaaggaaaaagatgtcccgggcacaggatggtatactgaagtacatgctgaaaatgatggaagtttgcaaagcacaaggttttgtatatggtatcattcctgaaaaagggaagcctgtaagtggagcctcggacaatcttaaagcatggtggaaggagaaggtcagatttgataggaatggccctgctgcaatcaccaaatatcaagcagaacatgcaacacctggagcaaatgagagtaacatggttgtggctcctacccctcatactcttcaggaacttca

SEQ ID NO: 1682 - DNA, 374 bp, Pinus radiata
ctgatttgaagtgctcattcatgaacaatccgagcagcagttatgcataaaatgttgattgcagggctccgttattgcgagcaactaaagggcgatggtgttacaatcaaatatcgagaacgagaatgaatctgaagcctctcggaatgctacaaattggtaatttggctcctgttagaagagcattctcatcacctagagcctcagcagatgaagaagctgctgcaaaagcagctgctgctgtagcagagacaggagccccaaccatatttgacaagatcataaagaaggaaattccagcaactattgtttatgaggatgcaaaagtgttggcatttcgagatattaatccacaggcaccagtccatatattg

SEQ ID NO: 1683 - DNA, 407 bp, Pinus radiata
gccgtggctgttcccaggagaggagagcctcagctgtctcgatctggccttaaggggttacagaagaagaatttcgaagatgggtagatcttcttgctattcaaagcaaggtcatagccgtgggatttggacccctatggaggatatgattctctctgaatacattcgaattcatggcagtgatggatggaaaaatatcgctaaacgagcaggtaaaattctaatagcaatttttattgcaaacgtaatactcattgagaggttaactaagcgggcagtttttgttctgcaggtcttaaacgacgtggaaagggttgcagattacgttggttgaactatcttcgccccgacattaaacgtggtaacatttctcctgatgaggaggacctcattattaggttgcatgg

SEQ ID NO: 1684 - DNA, 361 bp, Pinus radiata
gttccagaccttttgcatcttcattattcttccgcctgtgaaaagatggggagatctccgtgctgtgagaaggctcatactaacaaaggggcctggactaaacaagaagatgaccgccttatcgctcacattcgagcccacggcgaagggggctggcgttctcttcccaaggccgcagggctgctgagatgcggcaagagctgcagactgcgatggataaactacctgcgtcccgatctgaagcgtggaagcttcacggaagaagaagacgaactcatcatcaaactccactccttcgttggcaacaagtggtctttaattgcagggagattgcccggacggacggacaacgagataaaga

SEQ ID NO: 1685 - DNA, 340 bp, Pinus radiata
caagagtaaacccgaaggaatagaaggggaaggaggcatcggcagcgttgttcctcctcctctcctctcctgcatttctcaaactcaaatacctctcctctcacaatcatggaaggcggagtcgtctttgaatctgtgcaaaacccactggatcgcctgaacactggaaatatggaccatggttgtgcccattacaggagacgatgtcggattcgggccccttgttgcaatgagatctatgattgtaggcactgtcacaatgaagccatgagccatctaaaggaccccttgctgcgccatgagctcccaaaatacaaagttgaacgggttatttggtctc

SEQ ID NO: 1686 - DNA, 332 bp, Pinus radiata
ggctcttcccggcagacctagtaagccgactactgtaaatttattcttttagggttacagaagaagaaaatacaagatgggcagatctccttgctgctcaaaagaagggctcaaccgtggggcctggaccaaaagggaggatatgattctctccgaatacattcgaattcatggcgatggcggatggagaaatatgcccaaaagagcaggtcttaaacggtgtggaaagagctgcagattacgatggctgaactatcttcgccccgacattaaacgtggaaacatttcccctgatgaggaggaactcataattcggctccatcgccttcttg

SEQ ID NO: 1687 - DNA, 347 bp, Pinus radiata
gattgatcaaacacaaataccgtaaaattgcagcgaaaatccaaaattccaccatggggactgtggcggaagatggcagcaagggttacaaggccgtaaatccccatcccaaaaagggcgtcgcctcgtggctggtggacatggtggagaaactggtggttgaaacttctgcgttgtatagttcgaagaagcctctgcattttcttttggggaacttcgctccagtctcggaaactgcccccaaatcgcacctgcctgttgttgggcaacttcctagttgcttggatggagagttcgtgcgccgttggtcccaatccgaaattcgcaccggtagctggctatcactg

SEQ ID NO: 1688 - DNA, 354 bp, Pinus radiata
cgataggcgtggaagatttaatgacataatctgtaggacatgcaacgagccagggcataccagtagggagtgcactggaattctcatctgccacaactgtggtggccgtggacatgttgcatacgaatgcccctctggtcgtgtgatgctgcgggacatgcgcaggcattgatgctgcagtttctacaccaccttgactttttagattatctgattttgacaaatctattttgaatttggaagttctttttctgagtagttagatcagtagacctgtcgtatcagttattatacagttttcttatactagtcctttacttcaagactggctgatatacttctattttcatatga

SEQ ID NO: 1689 - DNA, 348 bp, Pinus radiata
ggagattcctctctgcaaaatgcgctggaccttgctcatggttatctgagccagattccatcatatggtcatcgggaagttctagtcttgtattcagcactaagcacttgtgatccaggggatatcatggaaagtataaagaaatgcaagaattcgaaaatgcgatgctcagtggttggattatctgcagaaatttatatttgcaaacacctctgtgaggagacgggaggattctattccgtggcacttgatgagtcacatttcaaggaccttctgcttgaacattgccctccaccaccagccatagcagagtttgcagttgctagcttggtcaagatgggatttcct

SEQ ID NO: 1690 - DNA, 349 bp, Pinus radiata
tgcataccatcattgtaatggaggtgaaaggaataggagtgggattcttattaagcaatggaaggttacgctgcgaataacgatgcagaacttctgagcaaaacccttcaagtggaacagaagttgttctatttcgatctcaaggaaaacccccgaggtcaataccttaaaatctctgagaagacctccggctcacggtctacaataattgtgcccattggtggagttgcatggttcctcgatctctttaattattatgtcgacggagatgacgaggaagttttgagcaaggaattgcagctggatgccaaggtattttatttcgatgttggggtgaataaaaggggtc

SEQ ID NO: 1691 - DNA, 339 bp, Pinus radiata
ctgaagtgccgtcgattgttcgggaggatagcgttttcgaagttcgttgttgagttatctcgcgagactgtagaattttagggttgttttccacaaaccgacttttcccgacttcaaatcttgatattgaagtgacatggccggcgagaaaagaaagattaatagaatagctaacgcttcggccaggcaggtcaccttcgcgaagaggcggagggggctgttcaaaaaagctcaggagctatcgattttatgcgaagccgatgtagccctcctcgttttttcttcaactggaaagctgtaccagtactccagctccagcatgaaaatgatattggacca

SEQ ID NO: 1692 - DNA, 380 bp, Pinus radiata
gaaaccatgagggtcttgccacaaggtttgttgagccacaacctgaatggtcagtatttcgtgaggcgagctttggacatggggaacttagagttgccaatgcaacacatgcacattggagctggcatcgtaatgatgatgatgagccagttaaatctgatgaagtttggatcaataatcttagccaatcaagagaatgtatagaaagtaccgactacagtggaaggaaaatactaattgcaccttgagtatatgcttggagggagaagtgatctaactgtaattgccaaggcaaaacactgagtgtgagctcatgcacggcaatgaatttatggttcagtgtttagttgtatggaagtatattattcattagacatgca

SEQ ID NO: 1693 - DNA, 442 bp, Pinus radiata
ggatatcatcagctgtccagtttgtcctaagagactacagaagaagaatatagaagatgggtagatccccttgccccccaaaagaagcgcttaaccgtggggcttggacaggcatggaggatacgattctcaccgagtacattcgagttcatggcagtggtggctggaaagatatctccaaaagagcaggtcttaagaggtgtgcaaagagttgcagattgcgttggctgaactatcttcgtcccgatattaaacgtggtaacatttctcccgaggaagaagagctcattattcggttgcatcgccttcttggaaatcggtggtctctgatagcaggacgactgcctggtcgaacagacaacgaaatcaagaattactggaacactcatatgagcaagaagccatggctgtcaatggacgaatctcagtccaatacttcgca

SEQ ID NO: 1694 - DNA, 351 bp, Pinus radiata
tttttttttttttttccttactcccacctttttgttcgtctgcgcatggttttgtatctgatgtcaaaattgtctgcaacgcatgctgatgttgattcccatgcccgactacaacatctgcacaaataggaagttaagaataaagcgaacaataaaagtgccagccattagcagtaaattggcagatatccctcccgatgattattcgtggaggaagtatggacaaaagccaatcaagggctccccacatccaaggggctattataagtgcagcagcatgagaggttgtcctgcccggaaacatgtggagcggtgtccagatgaaccttccatgcttattgtgacttatga

SEQ ID NO: 1695 - DNA, 304 bp, Pinus radiata
caaggccgtaaatccccatcccaaaaagggcgtcccctcgtggctggtggacatggtggagaaactggtggttgaaacttctgcgttgtatagttccaagaagcctctgcattttcttttggggaacttcgctccagtctcggaaactgcccccaaatcgcacctgcctgttgttgggcaacttcctagttgcttggatggagagttcgtgcgcgttggtcccaatccgaaattcgcaccggtagctggctatcactggtttgatggagatggaatgatccatggtctcagaattaaagatggt

SEQ ID NO: 1696 - DNA, 371 bp, Pinus radiata
gcgtggatgtacaacgaatatggatccatagaggtcctgcactttggggatttccctgttccaaagcctgggttaggccagctcttaattcgagtccgggccgctgctcttaatcctgccgactttaagagacggaaaggcttattaagaaacgcggattccgattttccgactgtgccaggctgtgatatgtcaggagtggtggtggaaattggtgatggtgtctccaagttcaaggccggtgacgagatatacagcaacatccagaatttcgcagcagggaggccaaagcagtgcgggactctcgcccagtacacagtggtggaggaattcctggtagcgccgaagcccagtaatttatcatttgagga

SEQ ID NO: 1697 - DNA, 523 bp, Pinus radiata
ccttcatggatatgttggagttgattcgccaccatttgctggaagtggaggacaatatagatatagatattgatattgagggaacttcgccgttgttcttcacccccactgccattgagagtggcgattatattaatattgatgatcatgacgatgatacccgagcaaatgccagagcgaccagggcctcatgccaaaatatcgtcagcagaacaacattaaaagagaacgcgaatgaatttacacaacagatccattcttcatcttctccaagatgctcagttatgaaaggagcagaggcgtttcaggtaaagcaacaaccacgggagcgggagaatggaaagaagagagagacaagtgccaggaattacagaggagtgaggcggcggccgtggggaaaattcacagcagaaatcagagattccgccgcgaagggtgctcgggtttggcttggaactttcaacaccgtcgaagaggctgctcatgcatatgaccgcgctgcctacagattccgtggagctcg

SEQ ID NO: 1698 - DNA, 471 bp, Pinus radiata
cgcgatagccgagagcacccttatctcctccactctgtttcatacatgcaacaagctctggcagcagcaatggcggcccagactatcatcgctgcctctatggcatctcctctaacattatcaaatggccactatccgtttcagtccgagttcaaggggtccgtggttcgaatcccgcagagggcattttccttcgcgcctgcagcccgggcgctgaccgtcgtcgcagaggccaagaaggccgttgccgtgctcaaagggaattcacaggtcgagggtgttgtcagtctctcgcaggaagacagcggtcccacaacagtgaaggtccgtttgacaggactgactcctgggaagcatggctttcatctacatgagtttggtgacacaaccaatggctgcatatcaacaggagcacattttaatccaaaaaaattgacacatggtgctcctgaggatgatgtacgccatgcg

SEQ ID NO: 1699 - DNA, 483 bp, Pinus radiata
cttcctggtgttgttgctgtgatttctctgccattctgtgttgggtttatggttttagcttcactacaagcctttagcaagcctcacaaataagctttgcagtaggatgtctcctcccccgtcatattccatgtttcccaattcaggaatgggcttaaatccctcagtgacatcttcagaaccctctagtcaggtctccggatcgatcccccatcaatattcaggctccgaggaagaccctaaactgacgatcgatgaaagaaagcagaagagaatgctttctaacagagaatctgcaaggaggtccaggatgagaaagcaacagcatttggatgaattgagagccgaagcagctcatctcagagcagagaacagtcatatgctaacaaaattcaacattgcttcacagaaatacatgcagctggaagaagagaattctcttctgaggtcctatgccatggatttaagcctcaagctgcagtc

SEQ ID NO: 1700 - DNA, 442 bp, Pinus radiata
ttttttttgaatagaaaaaatataattaggtacttttccttagaatgttgcagataattgcatttactttcctaagaagccattgtctaactttagaccatgatatgcagttactgcaaagatcttgacaaacctaaccaatcacttatacctactgtcaagtaaatatgtaacaaatatcaattttcaatcaaaggtgccattaagagttttaaccaacaaggtgaaggcaatgaatctctagatctcactaacctaattctgctctacctaccaagctagcagtctggcttgaaattagcagaacttccaatggttattacaatttacacatgtcacaaatgtagtcataggttcatctgcacttcttgtttgcaactgatagtaagtacacttccgctggccacatttaccacacttgaattggtctgttgtagcttta

SEQ ID NO: 1701 - DNA, 316 bp, Pinus radiata
ctaaattcatatgctggacatacgtgatgtcatggcaggtgttcttgctgtaaagaggaaaagtttggccaaagatatctatttcctacagaatgcagaaggttcaggtctggctccatttgactgttggctatgcttgcgagggatcaaaacaatggctttgcgcattgagaaacaacaggagaatgcaaggaaaattgcagaatttttgtcatctcatcctctgattgagaaagtatattatgctggccttcctagccacccaggccacaatttacattttttgcaggcaaaaggaggaggttcagttcttagc

SEQ ID NO: 1702 - DNA, 329 bp, Pinus radiata
ataatgtcatattttatatccagagacttgaactatttgtatgttgtaattcatattggttgacatgattgatatgtacatatgttacatggtattagcatgaggatgttgatgtttgaccttatttaagtgttcgtaggttgtaaaaaaaaaaaaaaaaaactcgagactagttctcctcgtgccgaattcggcacgagggaacagctgaggaagagcaagaagaggtgttttgcgtgtaacaggcgggtggggctgacgggctttaagtgccgctgtggtgaccttttctgcgctcagcacaggtactctgatatgcatgactgctc

SEQ ID NO: 1703 - DNA, 325 bp, Pinus radiata
  misc_feature (172)..(172): n is a, c, g, or t
ctcgtgccctggtgcaaagattgttataagaggcaagggttctgtcaaggaaggtagattacagcaaaaacgtgatctgaaacctgatccatccgagaacgaggacttgcatgttttggttgaggcggagacacaggatgctttggaaaaagctgccggcatggtggagaanctgcttatgcctgttgacgagggtttgaatgagcacaagcgggcgcagttgagagagcttgcggcacttaatgggacaatacgggatgatgaattctgcaggctttgtggtgaaccaagtcataggcaatatgcttgccctacaaggcttata

SEQ ID NO: 1704 - DNA, 453 bp, Pinus radiata
cttagcgtctatagaagagcagggactaattccatctttctccatttctatttctcttcccaatcaaaaccatggcgtctaacggacagcttaatgcaggcactggctgtgttggtgatctgaccaatgttggagatcgacgattggaggggaaggttgcaatagtaacgggcggggcagcgggcataggagaagccattgttcagttgttcattaagcatggagccaaagtcataatcgccgacgttgcggagaaagctggcagaaagcttgagcaatccctttcacccgctgtggcaacttacgtgcactgcgatgtgagcaaagaagaggatgtaagcgcagcagtggatgtggccatcgacaagtatggtcaactggacattatgtataacaacgctggaactaacgacagcgttttggtgaagagcgtagcagagtatgatatggagt

SEQ ID NO: 1705 - DNA, 242 bp, Pinus radiata
gaaaaggtcaattatcctgtgttgctacggaaatctaaatattcaaggttatggtatatgccagataagattttctttactccaaaagctgtcatcaaactggattttcactgtcctgaatcaaactgttcaccagaagcagtacttctaacttgtatttttactgcattattggtggattatttaaatgaatacggtgactataagtggatacagtcataagatgagaattttactggaga

SEQ ID NO: 1706 - DNA, 358 bp, Pinus radiata
gttttgggtttctgtttttaaccttggaaggttcaattttacagtttctacgggaattctcatattcaatctgtttggcagattgaactaaagatttttgtccgggtgatttttggattaaattcaaggtcgacgaacgtgaggtgctagggcttttagagtttggatggaacccatggacatcgttggcaagtccaaggatgacgtctcgcttcccaaagcaaccatgtttaaaattataaaagagatgctgcctccagatgttcgtgttgcaagagatgctcaggacttactggtcgagtgttgtgtggagtttatcaatctaatatcttcagaatccaatgaagtttgtggcaga

SEQ ID NO: 1707 - DNA, 334 bp, Pinus radiata
cgtttgcttgccgtgaaagaaatcgaacttccggcgcttgggtgcgagaaatatttgcaaatcgaacttccggcttgggtgcaagaagcttttgcgttttcggtttcagattaaagcaatatggagtcagaggaagacaaaatatctccagagaacaagaaaaggagattaaaaaccccacagcaggtcgaaggtctagagagcttttatgctgaacataagtatccttcggaagctatgaaatcacagttatcagaagaactgggattaacagagaagcaggtacaaggatggttctgtcacaggaggcttaaggataaaaggctcatgaagg

SEQ ID NO: 1708 - DNA, 288 bp, Pinus radiata
gcatcggcagcgttgttcctcctcctctcctctcctgcatttctcaaactcaaatacctctcctctcacaatcatggaaggcggagtcgtctttgaatctgtgcaaaacccactggatcgcctgaacactggaaatatggaccatggttgtgcccattacaggagacgatgtcggattcgggccccttgttgcaatgagatctatgattgtaggcactgtcacaatgaagccatgagccatctaaaggaccccttgctgcgccatgagctcccaagatcaaaagttga

SEQ ID NO: 1709 - DNA, 406 bp, Pinus radiata
gttccccgtctcctccgtctgctaggcatttctctgcgattcttcttcttctgctcggggtctctctggtgaaatcgtccccgcaggaggagggctgagggcagggctcggctcggctcggttcgtttcggcaggagttatctcagggtttttctcttgcttttctgcgccttcggactcgggcttacagttacagcatctggaaaatggcgtcacaggagagctcaaaaatgcaagaggaagggagtgggagacaagtgccggaagggcccattcactgtttgaacaactgcggcttcttcgggagcgcggccaccatgaacttgtgctccaagtgctacagagagcttaacgccaaaccaccttctttttcttctcacttgaaacctcagcaacctacgcttga

SEQ ID NO: 1710 - DNA, 434 bp, Pinus radiata
ccctcttcatcatcggcaaactcattatctcattcatcatttggtggaacctggccacaacctagtgtaccaacattgcatcttcccggtggcagtcttcaagttggtcttcaagctagtcgcctccgagcatcacttaatgccagagatgtacctcttgaggaattgaccttagattcggattgtgaagggcaacttataaatgattttgcttctctttcaggatctggaaacaccttgatgaggtctggaaaatacaagagtcatggctgtagtattgctccagttaatcttgaggatctatttgcttctgagatgtctcctaggggaccgtgccttgaaccttccgtgttttctcaaataagttctcaaattcagtcacataaggcagctcaagttcagcctcaggtgcaaacatcaattagtaatcagat

SEQ ID NO: 1711 - DNA, 387 bp, Pinus radiata
tttacttacacaccacctggaaatgaagatcgtcacttgctattcgttgatgagttacgtggtcgcttagtgactcttctagggggacgtgctgcagaggaagtggtatactcaggtcgtgtttccactggtgcacttgatgatataaagcgtgcaacagatatggcatacaaagctgtcgctgaatatggtcttaacaagtccataggtccaatttcattggcgactttgtctggtggcggtcttgatgagtctggaggagcaatgccatgggccaaggatcagggacatatggtagaccttgttcaaagagaggtgaaaattttgctacaatcggctttgacaatggcactccttgtcatacgctctaatcccactgtacttgag

SEQ ID NO: 1712 - DNA, 440 bp, Pinus radiata
ctccttagcgtctatagaagagcaaggactaattccatctttctccatttctatttctcttcccaatcaaaaccatggcgtctaacggacagcttaatgcaggcactggctgtgttggtgatctgaccaatgttggagatcgacgattgcaggggaaggttgcaatagtaaccggcggggcagcgggcataggagaagccattgttcagttgttcattaagcatggagccaaagtcataatcgccgacgttgcggagaaagctggcagaaagcttgagcaatccctttcacccgctgtggcaacttacgtgcactgcgatgtgagcaaagaagaagatgtaagcgcagcagtggatgtggccatcgaaaagtatggtcaactggacattatgtataacaacgctggaactaacgacagctttttggtgaagagcgtagaa

SEQ ID NO: 1713 - DNA, 446 bp, Pinus radiata
  misc_feature (321)..(321): n is a, c, g, or t
ggctcttcccggcagacctagtaagccgactactgtaaatttattcttttagggttacagaagaagaaaatacaagatgggcagatctccttgctgctcaaaagaagggctcaaccgtggggcctggaccaaaagggaggatatgattctctccgaatacattcgaattcatggcgatggcggatggagaaatatgcccaaaagagcaggtcttaaacggtgtggaaagagctgcagattacgatggctgaactatcttcgccccgacattaaacgtggaaacatttcccctgatgaggaggaactcataattcggctccntcgccttcttggcaatcgatggtcgcttatagcaggaagattaccaggtcgaacagacaacgaaatcaagaactactggaacactcatatgagcaagaagctgcttccattgaacgaatctcaac

SEQ ID NO: 1714 - DNA, 519 bp, Pinus radiata
attcatttccgtgtaagttgcaacgcctcattgtttcctcaacctagtgagtaacattcgtgaattcgttatgcaagtagcttgcggaagggcacttctatcatgttattcttattccgagctactgtcagctatatgatggacctgtgttttcatcactggctcacttcacctgtttgagtatctgccatttttggatgtttgtgtaagcttggctaaataccagagacacaaagaaaccgtcctgtagccggagttatcgaaactatttacaatgccacgggtgaaatttatttccaggaacttcatggacatggtggcagcattaccggctgcaaagttagatcggctttatgatagtcatttcatttgcgaagcggttctgaggtctctgactcctgtgccaaagaaatatgtattgcaactattatatattgacgttgcggtgcctgccaaatcactggaggaatgggttctttcagatggcctgtctaagcacaaagcagcaattgataggtt

SEQ ID NO: 1715 - DNA, 162 bp, Pinus radiata
cggcccgagcaattttgcttctctgctaaacgatgggaagagcgccttgctgtgccaacggtgacagaagcaagggagcctggaccaaggaagaggatgacaggcttacccaatatattcaggctcatggagaaggatgctggcgttctctccccaagggcc

SEQ ID NO: 1716 - DNA, 481 bp, Pinus radiata
gttacagtagtgcgtacaaaattccagtgacattgacttgcaatctacttttatggagtaggtagggctccgtgaaattgcgcatgtcatgaatgtgctcgtctgtaagtggctgctttacgccggcgaaggttcggaccctgtggtggtggtgaattgactgtaagaggccgccgatctcgatcgaaggtgtacagagatcattaatggcgatgccgatgccgttgcttgtgaattgctctggctgtcagacgccactgcagctaccgccgggggcgaagtcgatacgctgtgctctgtgtcaagcggtcactcatgtagcggaacatcacggcgatattccgcctcgaggttaccgccaccagcagccattggctcctcccgcggtcagtccccagcactattcgcccgctccgccttcttcccacggcaggaagaaggcggtcgtctgcggcatttcttacagatattcccagcacga

SEQ ID NO: 1717 - DNA, 546 bp, Pinus radiata
agaagtgccaactgcaaactttgatttacaccatgctcactgtatacgaaacttgcagcgctgcactgtttgcggggatatgattccaaaaagtcgttctatggaacaccaccaggatacccatgctcctgtatcttgttcacagtgtggcgaatccattgaacgtgaattactagtcatccatgagcgtgacaagtgtcttcatagaattgttacatgtggttattgcgagtttccactgccagctgttgatcttgataaacatctgaacatctgtgggaatagaacagagtattgtaatccgtgcagcaagtatgtgagattgtgtgaaaagctagctcatgatttacagttccatgaaggaaattctgatgacactggggattcttcaagagagcagcacggggaaaataatcacagctcaccagcagcagaactgtctcggagagttcctagggaacggccacgagatacctcgcagcgtcgttggcttgtcacattagcaatcacaggaattgccataattataggatcatttgttcttca

SEQ ID NO: 1718 - DNA, 631 bp, Pinus radiata
tataaccgcctcttcttatactagtgcctttatcggttccattcaaacttgctcacggattccgacccttccggctaaagctgctgcatttctgtgtgtattgaagatggggagatctccctgctgtgaaaaagctcatacaaacaaaggggcgtggaccaaagaagaggacgatcgcctcatcgcccacattcgaactcacggcgaaggttgctggcgctcgcttcccaaggccgcagggctgatgcgctgcgggaagagctgcaggctccgatggataaactacctgcgtcctgatctgaagcgtggaaacttctcagaagaagaagacgaactcgtcatcaaactccactccctactcggcaacaagtggtctcttattgcaggcagattgcccgggcggacggacaacgagataaagaactactggaatactcacatcaagagaaaattgctaaacaggggactcgacccccagtcccatcgccccctcggccagccgcacaacagcaacacgacctgcccctctctgcccgccctcgagcacgaaattcttgtgttccagaggccaagaacgccggagatagcagatttctttcaatacgagcgctctgaaagctcgccgatggaa

SEQ ID NO: 1719 - DNA, 561 bp, Pinus radiata
gaacgaacggtgaagatacacagaggatctctcaacggcttcatctccgtcgtcgtctctcctccttccatctccagcgtccgatctgatcttatcaaaggaagcccttaaatccctccagctttccaagcgcgggttctgttgctgtatcccaggtccctggtcatatggcggaagctggcagcccgggcagccaggaaagtcctcgttccggggaacaaagcccccagtccagcgtgcgggagcaggacaggttcctacccatcgccaacattagccgcatcatgaagaaggcgctgccggccaacggcaagatcgctaaagacgccaaggagaccgtgcaggagtgtgtctcggaatttatcagcttcatcaccagcgaggccagtgacaaatgccagcgagaaaagaggaagacaatcaacggcgatgacttgctctgggccatgagcacgctagggtttgaagattatatcgagcccttgaaggtttacttgctcatgtacagagaggcggagggtgacaataagggatcttcaaaatctggagtagaccaatatg

SEQ ID NO: 1720 - DNA, 497 bp, Pinus radiata
ttattttgcagcatcgagaggcagcagctacggactaatcgatccatcatagccatttttaatttcgctgcccaatcgaaccatggagtctaagggacaggctaatccatctgttgcttctgtttgtaatctcagcaagaatggagagcgacgattggaagggaaagttgttatagtaacgggcggggcagcgggcataggagaagccattgttcagctgttcgcaaagcacggagcgaaagtcataatcgcagacgttgcagagaaagctggcagaaagcttgcagaatccctttctccagcatcggcaacttatgtgcactgtgatgtcagcaaagaagaagacgtgagcgcggctgtggatctggctatggataagtatggtcaactcgacattatgtataacaacgctggaactaacgacagctttctggtgaagagcgtggcagagtatgatatggagcaattcgatcgagtgatgaacgtaaacgtgaaag

SEQ ID NO: 1721 - DNA, 394 bp, Pinus radiata
aataaattgggttgcaaagctttccagttgtttgccagcattgaggtggctgagacttgaagaaagtgtacaacaatttgctgtctttatgttgtctcaagtcgatctttccagagaagctgcacacttgaaccgctttctttacaattttcgcaggtggaaagatgtgtcatttcctaagcccttgtacccacttgtacacccggcagttttggtggagacttatgaacaaggcgagagtgtggcacgctatgttgatcagccagaagcaaaccatagttttaatagatcacttgctcacactggcacgcatactctcctcaagatgctactggtggataatttcatccatgcagatatgcatcctggaaatattttggttcgaatgggacaa

SEQ ID NO: 1722 - DNA, 394 bp, Pinus radiata
taaggctaagcagaccagaggaggtgaaggagaaaaaagaaacaatggctggaataggaccgattagtcaggattgggaacccgttgtcatcaggaagaaggctcctaacgctgcagccaagaaggacgagaaggctgtcaatgctgcccgtcgaactggaggccctattgaaactatcaagaaatttaatgcaggatcaaacaaagcagcctcgagcagcaccaccttgaacaccaagaagcttgatgatgagacagaagttctcgctcatgaaagagtttcatcagatttgaagaaaaacataatgcaagcccgtttagataaaaagttgacacaagcccagcttgcacagcaaatcaatgaaaaacctcagattattcaagagtacgagtc

SEQ ID NO: 1723 - DNA, 317 bp, Pinus radiata
gattcttcttcttctgctcggggtctctctggtgaaatcgtccccgcaggaggagggctgagggcagggctcggctcggctcggttcgtttcggcaggagttatctcagggtttttctcttgcttttctgcgccttcggactcgggcttacagttacagcatctggaaaatggcgtcacaggagagctcaaaaatgcaagaggaagggagtgggagacaagtgccggaagggcccattcactgtttgaacaactgcggcttcttcgggagcgcggccaccatgaacttgtgctccaagtgctacagagagcttaacg

SEQ ID NO: 1724 - DNA, 265 bp, Pinus radiata
cggattccgacccttccggctaaagctgctgcatttctgtgtgtattgaagatggggagatctccctgctgtgaaaaagctcatacaaacaaaggggcgtggaccaaagaagaggacgatcgcctcatcgcccacattcgaactcacggcgaaggttgctggcgctcgcttcccaaggccgcagggctgatgcgctgcgggaagagctgcaggctccgatggataaactacctgcgtcctgatctgaagcgtggaaacttctcag

SEQ ID NO: 1725 - DNA, 284 bp, Pinus radiata
caagagtaaacccgaaggaatagaaggggaaggaggcatcggcagcgttgttcctcctcctctcctctcctgcatttctcaaactcaaatacctctcctctcacaatcatggaaggcggagtcgtctttgaatctgtgcaaaacccactggatcgcctgaacactggaaatatggaccatggttgtgcccattacaggagacgatgtcggattcgggccccttgttgcaatgagatctatgattgtaggcactgtcacaatgaaaccatgagccatctaaagga

SEQ ID NO: 1726 - DNA, 308 bp, Pinus radiata
caaaccgccaagtgagcttcatatctaaccaataataacacctgtatagcttcacagcaacagggcaccatgggccgagctccttgctgtgataaaatgggagtaaagaaaggcccctggactctagacgaagataaaatactggtcgactacattaccaaacatggccatggcaactggcgtgcactgcccaagcaagcagggctcctgcgatgtggaaagagttgtcgcctgcggtggacgaattacctgaaacccgacatcaaaagagggaattttagtccagaagaggaagatcaaattattaa

SEQ ID NO: 1727 - DNA, 338 bp, Pinus radiata
gacgagcggttgttcattaagcatggagccaaagtcataatcgcagacgtcgcggagaaagctggcaggaagcttgaggaatcactttctcccgctgtggcaacttacgtgcactgcgatgtgagcaaagaagaagatgtgaccgcggcggtggatgtggccatggataagtatggccaactggacattatgtataacaacgctggaactaatgacagctttttggtgaagagcgtggtagagtatgatatggagcaattcgatcgagtgatgaatgtaaacgtgaaaggagtgatgcacggcattaagcaccccgcccgcgttatgatcccgcggaa

SEQ ID NO: 1728 - DNA, 350 bp, Pinus radiata
  misc_feature (231)..(231): n is a, c, g, or t
gcacgaggttttaacatcttttgttgatatccagaggcttgatgatgtgaaaaatgccataacaccatctaccaaggttttgtattttgaatctatctcaaacccaactctggcagttgcagacatcccatctctgtctgccattgctcatgagaaaaatgtcaaggtggtggttgataataccttttctcccatgatcatatcccctgcaaagcttggtgctgatgttgntattcacagcatttcaaaatatatcagtggaggtgctgatgttatagcaggagcaatatgtgggcctgcagatctgataaattccatgatggatctccatcagggaaccttgatgctct

SEQ ID NO: 1729 - DNA, 333 bp, Pinus radiata
ccagtccatggtttcaagttagttagtccaataaagcagagatgggtcgtgctccatgctgcacaaaagttggtctcaacaagggagcatggtctgccgaagaggatagtcttctgggaagatatattcaaactcatggtgaaggcaattggaggtctctgcccaagaaagcagggctgcgaagatgtggaaagagctgcagattgcgttggctaaactatcttcggccatgtatcaagcggggaaatattacaacagatgaagaagaacttattatcagaatgcatgctctcttgggcaaccgatggtcgataatagcagggagagtccccg

SEQ ID NO: 1730 - DNA, 508 bp, Pinus radiata
  misc_feature (3)..(3): n is a, c, g, or t
ctngtgccgaagaaatctgaatcgtcgcgttcgtggtcgacaggaagccacagtgggcggcctgagaaactggttgtggtggtcgggagtgtcaagattgtgacggtgggcggaccagcgtctagtttgtgttggtggtcggcattagaaggggcagagggggcttttcagtgcatgggattatgggcaacgaaggcgcggcatcgatgcggctatggggcgacgataataattccatgatcgaggctttcatggggaacctcgattactcttactccaccttctggaatggcatcgatgccaatccctcttcgctaccctcgcccgccacttcccgtcgtctgccgcagtgttgctatcgccacgcccttcaatcaggacacgctgcagcaacgcttgctggcgtttgtggagggagcggctgagtgctggacttatgccatattctggcagttgtcgagcgatgccagcggcggctcggagcttgtctggggcgacgggtactaca

SEQ ID NO: 1731 - DNA, 411 bp, Pinus radiata
  misc_feature (64)..(64): n is a, c, g, or t
cggagtgaaatcatttgctgccgtcactgctgccaaggtttgttactgttagattttgttatancggacaatggcttcaacagacatagatatgattcccgtgccctctggcgagggttccagctctcaagcgggaccaagcgcttccaccaagaaggccaaacgtttcgaaatcaagaagtggaatgctgtagccctttgggcgtgggatattgtggttgataattgtgcaatttgcagaaaccacatcatggacctctgtattgagtgtcaggcaaatcaagcaagtgcaacaagtgaagaatgtactgttgcatggggtgtttgcaatcacgcctttcatttccattgcataagtcggtggctcaagacacgacaagtctgcccattagataataagtgagtgggagt

SEQ ID NO: 1732 - DNA, 390 bp, Pinus radiata
cgaaactcgaatcgatatgctttgtggccggttcaaatatttgagctggcttagcttctctggttcagaaatggcggactaaagtaatagtgtgccccgaggtctggtgttcgaatctcgttggcgtgaaaggtcaaatttttctctcgagtttcattgattctgaaaaactggcatagctatggcgatgagcaatgggagattgtgtgaagatttggataggattaaggggcccgtggagccccgaggaggacgcgtcgctgcagaggcttgttcagaaatacgggccgaggaactggaccctgataagtaaaggaatcccggggcgatccgggaaatcgtgcaggctacggtggtgcaatcagctgaccctcaggtggagcacagacc

SEQ ID NO: 1733 - DNA, 277 bp, Pinus radiata
atttactggaaccattgttggaataagtgatgctgatcctgtgaactggccgaattcaaagtggagatgcctcaaggtacaatgggatgaaatatcagcaattgcacgaccagagagagtttccccgtggaaattagaaccttcattaactccagtggcagtgaatcctctgccagtagccaggggcaagaggcctcggccaaatatattaccttcatcttccgatttatcagtgcatgacaaggccccagtggattctactcaggtgcacaggttt

SEQ ID NO: 1734 - DNA, 221 bp, Pinus radiata
gttgcagggaagggttgccgtgatcacaggaggcgccagtggaatcggagaggctaccgccaagttgttcgtggagaatggagcgaaagtagtgattgcagaccttcaggacgaccatggaaaccgtcttgctcaatccctcgctcccaacgcctgctttttccactgcgatgtctccaaagaggcggacgtttccgccgtgctggacttggcgctggaga

SEQ ID NO: 1735 - DNA, 316 bp, Pinus radiata
  misc_feature (161)..(161): n is a, c, g, or t
tgggctgttcccaggagaggagagcctcagctgtctcgatctggcgttaaggggttacagaagaagaatttcgaagatggttagatcttcttgctattcaaagcaaggtcataggcgtgggatttggacccctatggaggatatgattctctctgaatacnttcgaattcatggcagtgatggatggaaaaatatcgctaaacgagcaggtcttaaacgatgtggaaagagttgcagattaccgttggttgaactatcttcgccccgacattaaacgtggtaacatttctcctgatgaggaggacctcattattag

SEQ ID NO: 1736 - DNA, 464 bp, Pinus radiata
cagcatcgtggctcttcccggcagacctagtaagccgactactgtaaatttattcttttagggttacagaagaagaaaatacaagatgggcagatctccttgctgctcaaaagaagggctcaaccgtggggcctggaccaaaagggaggatatgattctctccgaatacattcgaattcatggcgatggcggatggagaaatatgcccaaaagagcaggtcttaaacggtgtggaaagagctgcagattacgatggctgaactatcttcgccccgacattaaacgtggaaacatttcccctgatgaggaggaactcataattcggctccatcgccttcttggcaatcgatggtcgcttatagcaggaagattaccaggtcgaacagacaacgaaatcaagaactactggaacactcatatgagcaagaagctgcttccattgaacgaatctcaacccaagactt

SEQ ID NO: 1737 - DNA, 361 bp, Pinus radiata
aaggaggcatcggcagcgttgttcctcctcctctcctctcctgcatttctcaaactcaaatacctctcctctcacaatcatggaaggcggagtcgtctttgaatctgtgcaaaacccactggatcgcctgaacactggaaatatggaccatggttgtgcccattacaggagacgatgtcggattcgggccccttgttgcaatgagatctatgattgtaggcactgtcacaatgaagccatgagccatctaaaggaccccttgctgcgccatgagctcccaagatacaaagttgaacgggttatttgttctctctgtgacactgagcaaaatgtcaagcaagtttgcgaaaactgtggtgtt

SEQ ID NO: 1738 - DNA, 371 bp, Pinus radiata
gcttttctgtttcattcgatttcgattgtgtagtgaagagcatggccgaacaggtcttggaagggagtcagccagtggatctcgagaagcatccttcaggcatcgttcccaccctccagaatatagtgtccactgtaaacttggattgcaaattggacttgaaagccattgctcttcaagctcgaaatgcagagtacaatcccaagcgttttgcagcagtcataatgagaataagggagcccaaaactacagcactgatatttgcatcagggaagatggtttgcacaggtgcaaaaagtgaacaacagtcaaaacttgctgcaagaaagtatgctcgtattatccaaaaattgggctttcctgctcatttc

SEQ ID NO: 1739 - DNA, 589 bp, Pinus radiata
gtctcagggtaacgaaaatggggaaggtgacaatatggctgcatggctcactggaataaacactcttcgcatccagcccttcaaacttccgcctcttggcccccatgatgcgaaggtgcgcatgaaggctgtgggtatctgtggcagtgacgtccactatttgaggacattacggtgtgcggactttattgtaaaagagccaatggtgattggtcatgagtctgctggaataattgaggaggttggcagtgaagtgaaacatctggttcctggtgaccgcgtagctttggagcctggaatatcgtgttggcgttgtgaccaatgtaagcgaggctcctacaatttgtgtcccgagatgaagttttttgcaacacctcccgtgcatggttccttggccaatcagattgttcatcctgcagatttatgtttcaagttgccagataatgtaagtctcgaggaaggtgccatgtgtgaaccactcagtgttggggttcatgcttgtcgccgtgcttctgtaggccctgagacaaatgtcttggtaatgggggcaggtcctatcggccttgtcaccgtgctgtctgcacgtgca

SEQ ID NO: 1740 - DNA, 473 bp, Pinus radiata
ctttgccgtgttcggttcgtattcagggtttcgggagcttgttgtgtggtgttctgcaggtcaggacattgtaggcctggttatacaagatttcgaagcaaactctcggagcctcgaagaatcggcgcaaatttcaacggccttataactatttgggaagcagtactctggatttttctcccggaacggatcggagtgtgggaagcgtaataatcgcctggaatttgtcttctgcaagataatattcaattaatctattgtcgaaggaaatttgagccgtataagaggataatcaaaagaagccggttgatttctccgggattaaaggatggatcaagaaaactggaacatcggagctgatggcactggctgccaagctccagaagggcacactctttgcgccaataactgcggcttttttggcagttcggcaacgagaaacctgtgttcgaaatgttacagggatctgatta

SEQ ID NO: 1741 - DNA, 546 bp, Pinus radiata
atccaaataatacaactatctttgtgggtggcttagacccaactgtgacagatgatatgctgagatcattatttggtcagtttggagaacttgtgcatgtcaaaataccagtgggaaaacgttgtggatttgttcagtttaataacagggcttctgcagaggaagcattgcaaatgctgcatggtacagttcttggtcagcaagccattcgtctttcctggggacggagtcctgcaaacaaacaaactgctgggtgggttcaaccccaacaaccagatccaaatcaatggaatggagcttattatggttacggacaaggatatgatgcaggttatggttatgcaccacaacctcaggatcccaatatgtacagttatgccccttatgcatatggaaattatcagcagcagtaacatttacttgggttcaggctcttctgtggacgtggaaatatgggttcattcatagagctgtctctgtaaacagttgtttttaacgggcatccagtcaacttatctatattaaatttaatgaagaggaaagtct

SEQ ID NO: 1742 - DNA, 348 bp, Pinus radiata
agcaacctacgcttgagcagccgaatgcgaagcacccatcgattccgcttccctcggcgttggtgccctcaagtagcgacgttccaatggtggaagcagtagcagcagcggagacggccattggcaccgctccatccagctcggcagaacaggaggtggagaaacatgaacaggacgaggaggaacagctgaggaagagcaagaagaggtgttttgcgtgtaacaggcgggtggggctgacgggctttaagtgccgctgtggtgaccttttctgcgctcagcacaggtactctgatatgcatgactgctcttttgactacaagactgccggccgcctcgccattctca

SEQ ID NO: 1743 - DNA, 300 bp, Pinus radiata
  misc_feature (56)..(56): n is a, c, g, or t
  misc_feature (129)..(129): n is a, c, g, or t
  misc_feature (181)..(181): n is a, c, g, or t
cgaccatgcttcaagtgctgtcatggtggttgtgtcatcagcccctcaaattatgntgctcatgaaggcaggctatattgtaggcatcatagctctcaactttttagggagaaaggtaacttcagccanctttcaaaggcaacacctacaaaaggggtgactgataactcagacacagacnacaagtgatcattcgggccagatttttgctgacagagttgtagtgtgttattgattcatttcatacatttgatatgcaagcctgtacaatatcctgtgactgttaaaggcattcttttg

SEQ ID NO: 1744 - DNA, 355 bp, Pinus radiata
ggctcttcccggcagacctagtaagccgactactgtaaatttattcttttagggttacagaagaagaaaatacaagatgggcagatctccttgctgctcaaaagaagggctcaaccgtggggcctggaccaaaagggaggatatgattctctccgaatacattcgaattcatggcgatggcggatggagaaatatgcccaaaagagcaggtcttaaacggtgtggaaagagctgcagattacgatggctgaactatcttcgccccgacattaaacgtggaaacatttcccctgatgaggaggaactcataattcggctccatcgccttcttggcaatcgatggtcgcttatagca

SEQ ID NO: 1745 - DNA, 294 bp, Pinus radiata
attgcttgaaagagatgcacgagcatcttcaatttgcttgtccagtgtgctccaaatctgtctgtgatatgtctaaattgtgggagaaacttgaccgagaggttgctttgactccaatgcctgaagcttaccagaacaaaatggtttggatcttatgcaatgattgtggagtaacttctgaagtaaattttcacattgttgcacacaagtgtcaaagttgcaattcttataacacccggcagaccaggggaggtccttctgcaagttcatgtagatctcatctttgatattctc

SEQ ID NO: 1746 - DNA, 316 bp, Pinus radiata
  misc_feature (34)..(35): n is a, c, g, or t
aaccgcctcttcttatactagtgcctttatcggnnccattcaaacttgctcacggattccgacccttccggctaaagctgctgcatttctgtgtgtattgaagatggggagatctccctgctgtgaaaaagctcatacaaacaaaggggcgtggaccaaagaagaggacgatcgcctcatcgcccacattcgaactcacggcgaaggttgctggcgctcgcttcccaaggccgcagggctgatgcgctgcgggaagagctgcaggctccgatggataaactacctgcgtcctgatctgaagcgtggaaacttctca

SEQ ID NO: 1747 - DNA, 263 bp, Pinus radiata
gtggctgttcccaggagaggagagcctcagctgtctcgatctggcgttaaggggttacagaagaagaatttcgaagatggttagatcttcttgctattcaaagcaaggtcataggcgtgggatttggacccctatggaggatatgattctctctgaatacattcgaattcatggcagtgatggatggaaaaatatcgctaaacgagcaggtcttaaacgatgtggaaagagttgcagattacgttggttgaactatcttcgcc

SEQ ID NO: 1748 - DNA, 145 bp, Pinus radiata
  misc_feature (44)..(44): n is a, c, g, or t
ttcggtcggagaattgtgggtgggagccccaccggaggagtganggaaactcaagagatgttggacttttgtgcagagcataacatcagttgcatgattgaaaacattgcaatggattaccgtgaacacagcaatcgaacgatta

SEQ ID NO: 1749 - DNA, 206 bp, Pinus radiata
  misc_feature (45)..(45): n is a, c, g, or t
ctggtgtgaatcacatcggagatggcattcgcaggaacacagcanaagtgcaaggcatgcgagaagacggtgtacgtggtggatcagctcacagccgatggttcagtctttcacaaggcctgcttccgctgccatcattgcaatggcaccttaaagctcagcaactattcttcttttgaaggggtgctgtactgcaaacctcactt

SEQ ID NO: 1750 - DNA, 263 bp, Pinus radiata
gttaaatttgaccccttcaatgcgttttatggttcagcctctatgttaatttgacacagtgagctgaaatattgcggctggatgtgtacattcacgactatctcataaaacggaatcttcttgcatctgccaagacatttatgacggaggcaaaagtttctccagaaccagtcgcaattgatgcacctggaggctttttgtttgaatggtggtctgtgttttgggatattttcatctcacggacaaatgagaagcactctgag

SEQ ID NO: 1751 - DNA, 321 bp, Pinus radiata
ccaatatgggggcagatagtatggttcctgttcacactcctgaagttattgagcattcttctacaaaagtttctattgatacagctgggtcaatggatgtggatgcagcatccaagtgcaatcacgtttacagaactacatctctcaaccactgtgtctcttcctcccccatagatgttggaattgtacctgacagcaacattacatctgatatttcaacaccttaccatgacccaagaggagtattcgagattcctcctcgggttgttcatcctggaggccaaggtgaggtcatgggaagagaagcaagagttctcagat

SEQ ID NO: 1752 - DNA, 316 bp, Pinus radiata
cggcccgagcaattttgcttctctgctaaacgatgggaagagcgccttgctgtgccaacggtgacagaagcaagggagcctggaccaaggaagaggatgacaggcttacccaatatattcaggctcatggagaaggatgctggcgttctctccccaaggccgcaggtctgcttcggtgtggaaaaagttgcaggctgagatggataaattatcttcgccctgatctgaaacgaggaggtttttctgaagatgaagacgatcttattctcaaactgcacgccctcctcggaaataagtggtctctgatagcgggtcg

SEQ ID NO: 1753 - DNA, 335 bp, Pinus radiata
attgagtaaaacttcattcagttggattctcatcgttttcatggcttacaacccgcaaacatgccgccgccgccaccagcccggacagcagcctgggctcagacaacgagtccggcggcggaggaggaggcggcggaggagaagggcagtcgacgaagaatggcaatggcaactacattagagagcaggatcgcctgctccccatagcgaacgtggggcggataatgaagcgggcgctgcggggaatgcgaaaatctccaaagacgcgaaggagacggtgcaggaatgtgtgtcggagttcatcagcttcattaccggcgaggcctctgacaagt

SEQ ID NO: 1754 - DNA, 349 bp, Pinus radiata
  misc_feature (336)..(336): n is a, c, g, or t
cacacagaagcttgtccgatggcgatcacgcaggggaaatggctacaggtgaatcagaaggaaggggggccaaaagcgcggagctcccatgcagttgcagtggtgggaaaaaaggcgtatgtgttcggtggagaggtggagccgcgcgtgccagtggacaatttgatgcatatcttggatctggaggacaattcctggtccgtggcggatgccaagggagaggcaccgcctcccagagtgggggtcaccatggtccctatcggctctgttatttatctcttcggtggtcgagaccagcatcacaaggagctcaaccatttctattccttcgatacnaattcctgccagt

SEQ ID NO: 1755 - DNA, 289 bp, Pinus radiata
  misc_feature (228)..(228): n is a, c, g, or t
  misc_feature (263)..(263): n is a, c, g, or t
tcttaatgccctaaaggagcccagcaagaagatcgacggccgcatgactgtcagtcagttggcctctgctggttcacagcctgcccagccggcggctgatgtatctgcccggaaaatctatgtcgggaatgttcccatggacatggcggcagatcgcctgctgagccttttttctcagtatggagagatcgaagaggggccactagggtttgataagcaatcgggcangtcaaggggttttgcgctttttattttcaagtcangtggacgcaactaagcgtgcgttgga

SEQ ID NO: 1756 - DNA, 235 bp, Pinus radiata
agagtatgatcctgttgctaaaatttcaatcattcctcgtggacaagctggaggtctgacattctttgctcctagtgaagagagactggaatctgggctttacagcagaagttaccttgagaatcagatggcagttgccctcggtggaagggtggcagaagaagttatttttgggaaagaaaatgtcacaacaggagcatcgaatgacttcccacaagtatctcgtgttgcccgg

SEQ ID NO: 1757 - DNA, 457 bp, Pinus radiata
gtaggatggaaggcacgggtaagagattcaaagggaaggtggcggtggtgaccgcttcaacacagggcataggattcgccattgcacagcaccttggcctcgaaggtgcttccgttgtcgtctcttcacgcaaaaagaacaatgtagaggaagcagtggaaaagatgagagccaaagggattgatgttctgggagtggcctgccatgtttccagtcgagaacagaggagggatctcatccaaaagactgtagataaatatggtcacatagacattctggtctcaaatgcagctgctaatccaactgtgaagcccattgttttagttccagagcctgtacttgataaaatttgggagattaatgtcaaggccactattcttcttgtccaggaagctgctgctcacttgtcacaagagtcatcaattatcataatttcatcagttgctgcttacagacc

SEQ ID NO: 1758 - DNA, 345 bp, Pinus radiata
catgtctttgattcgggcaagcagacatggagtaagcctatggtgaaaggaaccccgccctctcccagggacagccacagctgtaccactgtgggaacaaacttgtttgtatttggtggcacagatgggaagaaccctctacgggatttgcatatgctggacactactacaaatacatgggtgcaacctaacgtaagtggtgaaggaccggcagctcgtgaggggcacagtgctgcactcattgatcaccgtctttttatatttggaggttgtggaaaagttcaagatgaatctgaagagatatattacaacgacctttacatactagacacagttaacttaatt

SEQ ID NO: 1759 - DNA, 544 bp, Pinus radiata
gagcaacccacattgcattgattgcactacagtttcagcgattttcaggtcatctcaggtgtgcagcttaagcttattctcttgaaaatatggctgaggaaggagagaaggtcatggtaaacgtttatgatctaagccaaggacttgctcgtcaactctcaactacttttcttggaaaagccattgaaggaatttggcataccggtgtggtagtttatgggaaggagtattactttgggggtggtattcaacacagccctacagggcaaactccatatggaaaaccgtggaaagtggttgagttgggtgtcactcacgttccgatggaaatgtttgaagaattcctggaaaaaataagccctcgctatacagcttaaacatatagtttggtgcaccataactgtaacaacttcagcgatgaggttgcacagtttttggttggctgcaacatcccagatttcatccttaggctcccacaagaagtgatgaacagcccaatgggccctttaataatgcccatgataatgcagtttgaagctactct

SEQ ID NO: 1760 - DNA, 375 bp, Pinus radiata
  misc_feature (227)..(227): n is a, c, g, or t
cgatagccgagagcacccttatctcctccactctgtttcatacatgcaacaagctctggcagcagcaatggcggcccagactatcatcgctgcctctatggcatctcctctaacattatcaaatggccactatccgtttcagtccgagttcaaggggtccgtggttcgaatcccgcagagggcattttccttcgcgcctgcagcccgggcgctgaccgtcgtcgcanaggccaagaaggccgttgccgtgctcaaaggaaattcacaggtcgagggtgttgtcaatctctcgcaggaagacaacggtcccacaacagtgaaggtccgtttgacaggactgactcctgggaagcatggctttcatctacatgagtt

SEQ ID NO: 1761 - DNA, 333 bp, Pinus radiata
tttatatttttacaatccgaggttgcagggactttcagagaggtcgataccgtggaaaagactgagattgacggatcgattgcaatggcgtttgcggaagagtattccgatcgcgatgccgtatttcaaaagctgaaggcgaagtctgaaaacaagatttgttttgattgcaatgctaaaagtcccagttgggccgtccgtgacatatggagtattcatttgtcttgattgttcagcaatgcatcggagtcttggtgttcatgtcagttttggaggtctacaaatctcgatacatggaccatggagcagttgaaattgatgagctttggtggt

SEQ ID NO: 1762 - DNA, 331 bp, Pinus radiata
  misc_feature (165)..(165): n is a, c, g, or t
  misc_feature (202)..(202): n is a, c, g, or t
ctcgtgcccgactataggccgcaccaccctcagccgtttcttctttgcctctcttcttcttgtgggccatgtgacctatggcctattcattttctgcactggatctgagagcgagggggaagttaacgagagccctggctccacgaattttgaaggcggcgcggncatatgcgagagcagcctcttcggcggtgatgaaagngccgagccaaactctggtcctcttggcggggtctctgatttcagctgcgaatttaccccacggccgctgccggactcctctgtagcgcctagctccgctcatctgcttcatctctccactctgctcttc

SEQ ID NO: 1763 - DNA, 568 bp, Pinus radiata
ccggccgccccctccgacctgcctgatggaacacagtggcgctacagcgagttcttgaacgccgtgaagaagggtaaggtggagcgcgtccgcttcagcaaggacggcagctacctccaactgagcgccgtcgatgggaggcgtgccactgtaaccctgccaaacgacccggacctggtggacatccttgcgatgaatggtgtggacatatcggtttccgagggggaggcgagcaatggcctcctcagcgtaatcggtaatcttttattcccaattttagccttcgggggtttattcttcttatttcggcgggctcagggaggccctgggggtcccggaggtttgggcggccctatggacttcggtcgctctaagtccaagttccaggaggtgccggagactggagttacatttgccgacgtggcaggcgctgaccaggccaagctggagcttcaggaggtggtggatttcttgaaaaaccctgataagtatactgcccttggtgccaagatccccaagggatgcttgttggtaggtccgccggggacgggcaagactctactggccc

SEQ ID NO: 1764 - DNA, 351 bp, Pinus radiata
gagaaggaagctgctcttgctgccacaccaccagaagatgataaacctacaatatttgacacaatactgcagaaggagattcccagtacagtggtttacgaggatgagaaggtacttgcattcagggatatcgcaccccaagcacctactacatcattatcatccccaaagtaagggatggcttgactggcctatctaaggcagaagagaggcatgaggatatttaggtcacctgctatacactgcaaaagttattgcaaagcaggaaggtttatctgatggcttcagaattgtcattaacgatggtcctactggatgccaatctgtgaccatttacatattcatctactc

SEQ ID NO: 1765 - DNA, 462 bp, Pinus radiata
tgtaaatttattcttttagggttacagaagaagaaaatacaagatgggcagatctccttgctgctcaaaagaagggctcaaccgtggggcctggaccaaaagggaggatatgattctctccgaatacattcgaattcatggcgatggcggatggagaaatatgcccaaaagagcaggtcttaaacggtgtggaaagagctgcagattacgatggctgaactatcttcgccccgacattaaacgtggaaacatttcccctgatgaggaggaactcataattcggctccatcgccttcttggcaatcgatggtcgcttatagcaggaagattaccaggtcgaacagacaacgaaatcaagaactactggaacactcatatgagcaagaagctgcttccattgaacgaatcttaacccagactttgcctgtccccaaaaagaggtcgcaatcttcttctccctgc

SEQ ID NO: 1766 - DNA, 532 bp, Pinus radiata
  misc_feature (33)..(33): n is a, c, g, or t
  misc_feature (367)..(367): n is a, c, g, or t
gtaaaaatgaccacggcgtggacttctggaacnccccggagcgttcaggatggttgatgaagcagggcgagtacatcaaaacatggaggcgcagatggtttgttctaaagcagggaaagctcttctggttcaaggaaaattacatcacaagggattctaatccccgtggtgttgttccggtgagcacctgcctgactgtcaagggagccgaagacgtcctcaacaagccattcgccttcgagctctcgacgagcagagagaccatgtacttcatcgcagacagcgataaggagaaggaggagtggatcaattccatcggccgctccatcgtacagcattccaggtcagttacagacaaggagatcgntgattatgatagccagcgtgccgataaatgaatacccaattcgaatcggatggattcgctgtaaattggttgcaattagggtttctaggggtttcttttgaattttgtgatggaacgccttaaatcggttgtccattgcatttctaggatgaatcttaataaatt

SEQ ID NO: 1767 - DNA, 354 bp, Pinus radiata
aaccgcctcttcttatactagtgcctttatcggttccattcaaacttgctcacggattccgacccttccggctaaagctgctgcatttctgtgtgtattgaagatggggagatctccctgctgtgaaaaagctcatacaaacaaaggggcgtggaccaaagaagaggacgatcgcctcatcgcccacattcgaactcacggcgaaggttgctggcgctcgcttcccaaggccgcaaggctgatgcgctgcgggaagagctgcaggctccgatggataaactacctgcgtcctgatctgaagcgtggaaacttctcagaagaagaagacgaactcgtcagtaaactccacttcct

SEQ ID NO: 1768 - DNA, 430 bp, Pinus radiata
cttcgacggcgcgatagccgagagcacccttatctcctccactctgtttcatacatgcaacaagctctggcagcagcaatggcggcccagactatcatcgctgcctctatggcatctcctctaacattatcaaatggccactatccgtttcagtccgagttcaaggggtccgtggttcgaatcccgcagagggcattttccttcgcgcctgcagcccgggcgctgaccgtcgtcgcagaggccaagaaggccgttgccgtgctcaaagggaattcacaggtcgagggtgttgtcagtctctcgcaggaagacagcggtcccacaacagtgaaggtccgtttgacaggactgactcctgggaagcatggctttcatctacatgagtttggtgacacaaccaatggctgcatatcaacaggagcacatttta

SEQ ID NO: 1769 - DNA, 407 bp, Pinus radiata
gaacgaacggtgaagatacacagaggatctctcaacggcttcatctccgtcgtcgtctctcctccttccatctccagcgtccgatctgatcttatcaaaggaagcccttaaatccctccagctttccaagcgcgggttctgttgctgtatcccaggtccctggtcatatggcggaagctggcagcccgggcagccaggaaagtcctcgttccggggaacaaagcccccagtccagcgtgcgggagcaggacaggttcctacccatcgccaacattagccgcatcatgaagaaggcgctgccggccaacggcaagatcgctaaagacgccaaggagaccgtgcaggagtgtgtctcggaatttatcagcttcatcaccagcgaggccagtgacaaatgccagcgagaa

SEQ ID NO: 1770 - DNA, 347 bp, Pinus radiata
cagacttttgctccgaactgttctggtgaaacaaaatccagtattgagctaggtttagaatcgggtttgctggtcatctgggagaggcgatccattcagcttcgcaggcccccgaagatggcgttcgccggcacaacccagaagtgcaaggcatgtgaaaagacggtctatttggttgatcaattgacagctgataattctgtttttcacaaatcctgtttccgctgccatcactgcaatggaactttaaagcttagcaactattcgtcgtttgagggagttctatattgcaaacctcattttgaccagctgtttaagagaacaggaagtttggataaaagttttga

SEQ ID NO: 1771 - DNA, 469 bp, Pinus radiata
cgatagccgagagcacccttatctcctccactctgtttcatacatgcaacaagctctggcagcagcaatggcggcccagactatcatcgctgcctctatggcatctcctctaacattatcaaatggccactatccgtttcagtccgagttcaaggggtccgtggttcgaatcccgcaaagggcattttccttcgcgcctgcagcccgggcgctgaccgtcgtcgcagaggccaagaaggccgttgccgtgctcaaaggaaattcacaggtcgagggtgttgtcaatctctcgcaggaagacaacggtcccacaacagtgaaggtccgtttgacaggactgactcctgggaagcatggctttcatctacatgagtttggtgacacaaccaatggctgcatctcaacaggagcacattttaatccaaaaaaattgacacatggtgctcctgaggatgatgtacgccatgcg

SEQ ID NO: 1772 - DNA, 461 bp, Pinus radiata
tcttacccttttcctgagccaccgagaatttcctctccggaatacccacttctcagagattcttgctgcgaactctgttttcttcagcgagatttgtcagtgaattgtgaggagtattgagtcttatcatgcggatccagtgcgatgcctgcgagcaggcaactgcttcagtgatatgttgtgcagacgaggctgctctgtgcagggaatgtgatataaaagtccacaaggccaacaagcttgccagcaaacacaagagattatctctcctcgaaacttctcgaaagctctctcgctgcgacatttgccaggatagggccgccatcgttttctgtctcgaagatcgtgctatgctgtgccaagactgcgatgagtccgttcattctcgcgacacattagcagcaaaacaccaaaggttcctggccactggcattagggtaggtctcaatgccctgtcatca

SEQ ID NO: 1773 - DNA, 332 bp, Pinus radiata
gacaatatggctgcatggctcactggaataaacactcttcgcatccagcccttcaaacttccgcctcttggcccccatgatgcgaaggtgcgcatgaaggctgtgggtatctgtggcagtgacgtccactatttgaggacattacggtgtgcggactttattgtaaaagagccaatggtgattggtcatgagtctgctggaataattgaggaggttggcagtgaagtgaaacatctggttcctggtgaccgcgtagctttggagcctggaatatcgtgttggcgttgtgaccaatgtaagcgaggctcctacaatttgtgtcccgagatgaa

SEQ ID NO: 1774 - DNA, 322 bp, Pinus radiata
ctcctgtgcagcgtacgccttcgcctttgcgatttcgagccccattggaattgccattggaatacttattgacgccactacagagggccgagtggcagactggatttatgcaatctcaatgggttttgcgtgcggtgttttcgtttatgttgccatcaaccatcttctgatgaaaggattaatacagaaccctctgaaaggtgtgattcgctttgacaaacccttttacaaatatttggctgtactcactggagctggactgattgcagtggtaatgatttgggacacctagtggtaatgaattgggacacttcttagctgc

SEQ ID NO: 1775 - DNA, 428 bp, Pinus radiata
  misc_feature (42)..(43): n is a, c, g, or t
  misc_feature (49)..(49): n is a, c, g, or t
  misc_feature (54)..(55): n is a, c, g, or t
  misc_feature (58)..(58): n is a, c, g, or t
  misc_feature (68)..(68): n is a, c, g, or t
  misc_feature (78)..(78): n is a, c, g, or t
  misc_feature (85)..(85): n is a, c, g, or t
gagagagagagagagagagagagagagagagagagagactcnngccganttcgnnacnagcgaagccngtttccaaanatggatngggagaaactcatgaagatggctggtgcagtccgcactggcggaaagggtacaatgcgaaggaaaaagaagacaattcataagactgccacggcagatgacaagagacttcaaagtaccttgaaaagaataggcgtgaataacatccctgctattgaagaagtcaatatttttaaggatgaccatgttattcattttgctaacccaaaggtccaggcttctattgctgccaacacatgggtggttagtgggtcatcgcaaacaaaaaaacttcaagatcttttccctggtatcatcaatcagcttggaccagagagttttgccaatctgaggaagattgcaga

SEQ ID NO: 1776 - DNA, 512 bp, Pinus radiata
ataaaaccctaaatctctgcactcgccagctacgatttattctgcctccagcattttggtccttaccagtttgggcctctttttgcggtttctacacatagccgctgcgattctggggagtttctttggcttagatttttggggtaaaattctgggtattgtggtttgctcacactaattatcctgtcatggatcatcaacagcagcagtggatgatgcagcaacaaactcaacaacagtatcagcagccgcagtattcgaatgacgaaatccggacactttggatcggggatttgcagtattgggtcgatgaaaattatctccatacttgcttttcgcaaaccggagaggttgtgtctataaaggtgattcggaacaaggctacaggctatccggaaggttatggttttgtggagtttatttcccatgcagcagctgagaggattcttcaaacatacaatggtacacagatgcctggcacagagcaactttatagattaaattgggcttcc

SEQ ID NO: 1777 - DNA, 498 bp, Pinus radiata
ggatggaaggcacaagtaagagattcaaagggaaggtagcggtggtgaccgcttcaacaagggcatagggttcgccattgcagagcgccttggcctcgaaggcgcttccgtcgtcgtctcatcacgaaaacagaaaaatgtaggggaagcagtggaaaagctgagagccaaagggattgatgttctgggagtggcttgccatgtttccagtcgagaccagaggagagatctcatccaaaagactgtagataaatatggtcgcatagacattctggtctcaaatgcagctgctaatccaactgtggaccccattgtttcggttccagagcctgtacttgataaactttgggagattaacgtcaaggccactattcttcttgtccaggatgcttctgctcacttgtcacaagagtcatcaattatcataatttcgtcaattactgcttacaggccagaggcaatgatggccatgtatggggttaccaagactgctctttt

SEQ ID NO: 1778 - DNA, 435 bp, Pinus radiata
ggcgacacatggcccgtgtcaggcgccttgagaggccacaagcgtgcaattctatgcttggcgagtgttgcagaatttttatgcagtggatcggcggataatactattagaatgtggaaaaggggagaaggaaacaggcattactgtttggcggttttagaaggtcacagaggacctgttaagtccatcgcagtgtctttagacactgtgaggggatgccacgtctacagcggaagcctggatcatgacattaaggtttggcgggttagttcaaataaaagcagttccgacgatcatgccgagggtgccaaccataacaatcgcttgaaaaccatacactcccctgaggaaagcgtttttcattcaaggcaaatttttggtatttcatgaaactgatgtagccatctacgtgtcaactaactacaatatgcctgt

SEQ ID NO: 1779 - DNA, 470 bp, Pinus radiata
gccatggctgcatttcgcagggttctgttgctgtatcccaggtccctggtcatatggcggaagctggcagcccgggcagccaggaaagtcctcgttccggggaacaaagcccccagtccagcgtgcgggagcaggacaggttcctacccatcgccaacattagccgcatcatgaagaaggcgctgccggccaacggcaagatcgctaaagacgccaaggagaccgtgcaggagtgtgtctcggaatttatcagcttcatcaccagcgaggccagtgacaaatgccagcgagaaaagaggaagacaatcaacggcgatgacttgctctgggccatgagcacgctagggtttgaagattatatcgagcccttgaaggtttacttgctcatgtacagagaggcggagggtgacaataagggatcttcaaaatctggagtagaccaatatggaaagaaagagtcaaatgtacat

SEQ ID NO: 1780 - DNA, 359 bp, Pinus radiata
attcgttcgttccaacaacagcgaagccgatttccaaagatggatagggagaaactcatgaagatggctggtgcagtccgcactggcggaaagggtacaatgcgaaggaaaaagaagacaattcataagactgccacagcagatgacaagagacttcaaagtaccttgaaaagaataggcgtgaataacatccctgctattgaagaagtcaatatttttaaggatgaccatgttattcattttgctaacccaaaggtccaggcttctattgctgccaacacatgggtggttagtgggtcatcgcaaacaaaaaaacttcaagatcttttccctggtatcatcaatcagcttggaccaga

SEQ ID NO: 1781 - DNA, 360 bp, Pinus radiata
cggcccgagcaattttgcttctctgctaaacgatgggaagagcgccttgctgtgccaacggtgacagaagcaagggagcctggaccaaggaagaggatgacaggcttacccaatatattcaggctcatggagaaggatgctggcgttctctccccaaggccgcaggtctgcttcggtgtggaaaaagttgcaggctgagatggataaattatcttcgccctgatctgaaacgaggaggtttttctgaagatgaagacgatcttattctcaaactgcacgccctcctcggaaataagtggtctctgatagcgggtcgtttgcctggtcgaactgacaacgagatcaaaaactactggaact

SEQ ID NO: 1782 - DNA, 141 bp, Pinus radiata
cttctgtggattttatcaagaactctttaactagtgttgatgatgataaaggttcttttgcaccaacaaatttcattgagcaggctgatgaattgatccgaaaagagctggtgtcattactagagcacgacaatgcaaaat

SEQ ID NO: 1783 - DNA, 370 bp, Pinus radiata
atttgagtggggtgttttcactagcagaagcagcaaggtcagttttccactacagtactgcaacttcctcctatttcccacctcctcaagcttacccttctgacttcagttcccatcctgtgaatccaccatccaaacagctcaatgacacaaccagattagcccaagcattgttctgataattataatcctgacagttatattttttctctctgcatgtcttcacgttttaatcagatacttggcaagatctcccaatagagactccaacagctcaggggccataggtgcaatcgaagggcaactgcagcagctgtttcatctccatgacgcaagggttgagcaggccttcattgatgcattaccagtc

SEQ ID NO: 1784 - DNA, 381 bp, Pinus radiata
tggttttgatttgagtagcgggtttataagtccgggatttggtggtttttaaatggggctaagctattcttaattttgttctgttgggtacagcagagatttgaaggggatttgaatttgaatcatggaagttgagtgctgcagccctcggtcttccgctcaggggtgtgaggttgacatgaagccaacgatggtggtggaagatacgcttaatcaaggacgcatgcaatatggatgttcacactaccgccggagatgccaaataagggctccgtgttgtaatgaagtctttgactgtaggcattgtcataatgaggccaaaaattcaatggatgtccatccacttgacagacatgatgtaccgcgccatgaagttcgaaa

SEQ ID NO: 1785 - DNA, 441 bp, Pinus radiata
  misc_feature (135)..(135): n is a, c, g, or t
  misc_feature (213)..(213): n is a, c, g, or t
cacaggcagcagataatatgaggcacaagaattcgtgccaatttcgtttctttgcttactatttcttccttcttctttaacaaatggatatattctaatcagtgcgctggtaatttgcaggttgcagggaagggntgctgtgatcacaggaggtgccagtggaatcggagaggctacggccaagttgttcgtggagaatggagcgaaagtagngattgcagaccttcaggacgaccatggaaaccgtcttgctcaatccctcgctcccaacgcctgctttttccactgcgatgtctccaaagaggcggacgtttccgccctgctagacttggcgctggagaagcacggacgtctcgacatagtgttcagcaatgccggaatcccaggcgggttattctcgtccatggcagacgtcactgtcgaggatttggaaagggtcat

SEQ ID NO: 1786 - DNA, 435 bp, Pinus radiata
caataatgcaggagtccctcaattagtgctcaaccttgtgtttgtcttggaattgagcaggcttctggccaactggcttctgtcccctttctggatatcagaccatcaatatggcgttcctctggatcagcccctcgccaattggcccatcactcctttaactaatcctgctagtcttcgttattctggcctcatcttctccgcttctcttgcgccttctgcccctgtttcccccaaccctgcataccctgaccagcagagcgttcgtgagaatttgcccgccgtcttcgactatgggagtctcagtgctgatcgccaggaggtggttgtctgtattgtttgtttcaatgagttcgtgtcgcgggatcgagtgcgccggctagctaaatgtggccatgttttccatatggagtgtttggataagtggatcgacta

SEQ ID NO: 1787 - DNA, 323 bp, Pinus radiata
gttgttcattaagcatggagccaaagtcataatcgcagacgttgcggagaaagctggcagaaagcttgaggaatcactttctcccgctgtggcaacttacgtgcactgcgatgtgagcaaagaaaaagatgtgagcgcggcggtggatgtggccatggataagtatggccaactggacattatgtataacaacgctggaactaatgacagctttttggtgaagagcgtggtagagtatgatatggagcaattcgatcgagtgatgaatgtaaacgtgaaaggagtgatgcacggcattaagcacgccgcccgcgtgatgatcc

SEQ ID NO: 1788 - DNA, 359 bp, Pinus radiata
cccttatctcctccactctgtttcatacatgcaacaagctctggcagcagcaatggcggcccagactatcatcgctgcctctatggcatctcctctaacattatcaaatggccactatccgtttcagtccgagttcaaggggtccgtggttcgaatcccgcagagggcattttccttcgcgcctgcagcccgggcgctgacagtcgtcgcagaggccaagaaggccgttgccgtgctcaaaggaaattcacaggtcgagggtgttgtcaatctctcgcaggaagacaacggtcccacaacagtgaaagtccgtttgacaggactgacttctgggaagcatggctttcatctacatgagt

SEQ ID NO: 1789 - DNA, 350 bp, Pinus radiata
ggatagttgtgctccgaggaaagcattgaattggggataatggcggaaactgtcacatattcatggccggtgggtttcgtctgtttcgttctgacgatgttactacttcaactctacagaatagtgtggagggaggacagtcgaggctacaatttgcctcccggttccagtgggtggccattgattggagagaccttgagcttcatgcgagggattaattccatttctaaaccacgccaattcattcaagatcgagagcaaaggtatgggaagatattcagaacaaatttgtttggaagatctcgaatgattgtgtctgtggacccagaattcaacaagtatattctgca

SEQ ID NO: 1790 - DNA, 337 bp, Pinus radiata
  misc_feature (305)..(305): n is a, c, g, or t
gatttaggtagggttttaaggaagaaagacgatccaagcagtgggtttttatcgagctcccacgcagtttgaagggtgtcgcagcagaagaagatcggattcgttcatcctcatcacaaaagatggatcgggataagcttatgaagatggctggtgcagttcgtactggtggaaagggtacagtacgcagaaagaagaaagcagttcacagagccacaacaacagatgacaaaaggctccaaagtaccttgaagaggttaggagtgaatactattcctgctattgaagaagtaaatattttcaangatgagatggtcattcattttataaacccaaa

SEQ ID NO: 1791 - DNA, 315 bp, Pinus radiata
gtttgccattgaagaccaataaataattattgtgaagcagcagcgttttaatcagagatccagcaagaagaggaccaggaaaaatcatttgcagaacaagaagataatccaagatgtcaagcacacgcagccctcagtgtgggtgcggagaaacttgcgcttgcgccgattgcaagtgtggagttgtgagtattgcgcctccatccgaccaaacaagtgggggacatgcatattgcaagtgtggagaacactgcagctgcaatccatgtaactgttcaaagattgacgagactgttagtgggaaatccttctgta

SEQ ID NO: 1792 - DNA, 376 bp, Pinus radiata
gttttatcatgcggatccagtgcgatgcctgcgagcaggcagctgcttcagtgatatgttgtgcagacgaggctgctttgtgcagggagtgtgatataaaagtccacaaggccaacaagcttgccagcaaacacaagagattgcctcttgtcggaacttccccaaagctctctcgctgcgacatttgccaggatagggcagccatcgttttctgtctcgaagatcgtgctatgctgtgccaagactgcgatgagtccgttcattctcgcgacacattagcagcaaaacaccaaaggttcctggccactggcattagggtaggtctcaatgccctgtcatcagaatctccgggctcaagcgaatttgacaaacagcc

SEQ ID NO: 1793 - DNA, 407 bp, Pinus radiata
gggaattcccattctgcacatgcaatggacaatggaatgatggtatggatagttttagcaggggtagtggcaatggcagtgtggtatcttttggtacagcaccaacagcctaagcagagccacaatgttccttgggagactcttccaccgggggctgtgggatggccctttctcggagagatcatctctttctatttccgaacaccggattttgtgaagcagcggcggggaaggtatgggaatttgtttagaacgttcctgataggatatccaatggtaatctcaacagatcctgaggttaacaagtttattctgaataatgatggccggctgttcgttcctgcatatccgtcgcattggtcacagataatcggagagtgcaatatctttgctgctcgtggagactt

SEQ ID NO: 1794 - DNA, 532 bp, Pinus radiata
cctgggtgccttcgtcgctcacttcacaatcaagttgaaagtgaaatcaatcgatctgaaggtgaaggtgaaggtgaagcgtattctcattcgcctcacaccgccatggacattacagcacggcagatgttgcagttgattcgccaccatttgctggaagaggaagacgaaatggatgttcttgaggtagggggaaattatccattctcctcatcatcatcttcattatccttctctcccacagtgagctccgatttttcccacgccactgccagtggcccatgccaaaccagcgacagcacatcattatcagaagagaatgagagtgcacaaccctcttctgcttcttcttcttgtgtatccactgttttacgaagcgcagaggcggtaaatgtaaaggtaatgccacagccacagccacaggaggaggacagtcgagagaccatcaaagacaggcactacagaggagtgaggaagcggccatggggtaaattcgcagctgaaatcagggaccccgccacgaagggggcca

SEQ ID NO: 1795 - DNA, 502 bp, Pinus radiata
tgcataccatcattgtaatggaggtgaaaggaataggagtgggattcttattaagcaatggaaggttacgctgcgaataacgatgcagaactttgagcaaaacccttcaagtggaacagaagttgttctatttcgatctcaaggaaaacccccgaggtcaataccttaaaatctctgagaagacctccggctcacggtctacaataattgtgcccattggtggagttgcatggttcctcgatctctttaattattatgtcgacggagatgacgaggaagttttgagcaaggaattgcagctggatgccaaggtattttatttcgatgttggggtgaataaaaggggtcggttcttgaagatttctgaagcatctacatcctacagtcgcagcacaatcattgtacctgtaggaaacacaagaaaagatggttgggcagcatttagaaatattttaggagagataaatgaagcttccaacaagcttctggcccatccgaacat

SEQ ID NO: 1796 - DNA, 476 bp, Pinus radiata
  misc_feature (47)..(47): n is a, c, g, or t
cgaaactcgaatcgatatgctttgtggccggttcaaatatttgagcnggcttagcttctctggttcagaaatggcggactaaagtaatagtgtgccccgaggtctggtgttcgaatctcgttggcgtgaaaggtcaaatttttctctcgagtttcattgattctgaaaaactggcatagctatggcgatgagcaatgggagattgtgtgaagatttggataggattaaggggccgtggagccccgaggaggacgcgtcgctgcagaggcttgttcagaaatacgggccgaggaactggaccctgataagtaaaggaatcccggggcgatccgggaaatcgtgcaggctacggtggtgcaatcagctgagccctcaggtggagcacagaccttttaccccgtccgaggatgctgctattctgcaggcccacgcgcagcacggcaacaaatgggcaacaattgcccgagccctccccg

SEQ ID NO: 1797 - DNA, 509 bp, Pinus radiata
ttccagaccttttgcatcttcattattcttccgcctgtgaaaagatggggagatctccgtgctgtgagaaggctcatactaacaaaggggcctggactaaacaagaagatgaccgccttatcgctcacattcgagcccacggcgaagggggctggcgttctcttcccaaggccgcagggctgctgagatgcggcaagagctgcagactgcgatggataaactacctgcgtcccgatctgaagcgtggaagcttcaccgaagaagaagacgagctcatcatcaaactccactccttcgttggcaacaagtggtctttaattgcagggagattgcccggacggacggacaacgagataaagaactactggaacacacacatcaaaagaaaattgctgagcaagggactcgacccccaaacccatcgtccactaggccagccaaacaatacccccgtcactcggcctgttcccgagcacgaaattccggcattccagaaccctgcaacgccg

SEQ ID NO: 1798 - DNA, 247 bp, Pinus radiata
ccagactatcatcgctgcctctatggcatctcctctaacattatcaaatggccactatccgtttcagtccgagttcaaggggtccgtggttcgaatcccgcagagggcattttccttcgcgcctgcaagcccgggcgctgaccgtcgtcgcagaggccaagaaggccgttgccgtgctcaaagggaattcacaggtcgagggtgttgtcagtctctcgcaggaagacagcggtcccacaacagtgaa

SEQ ID NO: 1799 - DNA, 147 bp, Pinus radiata
tcattattcttccgcctgtgaaaagatgggagatctccgtgctgtgagaaggctcatactaacaaaggggcctggactaaacaagaagatgaccgccttatcgctcacattcgagccccggggaaaggggctggcgttctcttccca

SEQ ID NO: 1800 - DNA, 361 bp, Pinus radiata
cttcagtttgcattgaagaccaataaataattattgtgaagcagcagcgttttaatcagagatccagcaagaagaggaccaggaaaaatcatttgcagaacaagaagataatccaagatgtcaagcacacgcagccctcagtgtgggtgcggagaaacttgcgcttgcgccgattgcaagagtggagttgtgagtattgcgcctccatccgaccaaacaagtgggggacatgcatattgcaagtgtggagaacactgcaactgcaatccatgtaactgttcaaagattgacgagactgttagtgggaaatccttctgtaaatgtggagagaattgcgcctgtgaaacatgcacctgcagca

SEQ ID NO: 1801 - DNA, 359 bp, Pinus radiata
cgtggctgttcccaggagaggagagcctcagctgtctcgatctgcgttaaggggttacagaagaagaatttcgaagatggttagatcttcttgctattcaaagcaaggtcataggcgtgggatttggacccctatggaggatatgattctctctgaatacattcgaattcatggcagtgatggatggaaaaatatcgctaaacgagcaggtcttaaacgatgtggaaagagttgcagattacgttggttgaactatcttcgccccgacattaaacgtggtaacatttctcctgatgaggaggacctcattattaggttgcatggccttcttggcaatcgatggtctttgatagcaggac

SEQ ID NO: 1802 - DNA, 475 bp, Pinus radiata
agcgtctatagaagagcagggactaattccatctttctccatttctatttctcttcccaatcaaaaccatggcgtctaacggacagcttaatgcaggcactggctgtgttggtgatctgaccaatgttggagatcgacgattggaggggaaggttgcaatagtaacgggcggggcagcgggcataggagaagccattgttcagttgttcattaagcatggagccaaagtcataatcgccgacgttgcggagaaagctggcagaaagcttgagcaatccctttcacccgctgtggcaacttacgtgcactgcgatgtgagcaaagaagaggatgtaagcgcagcagtggatgtggccatcgacaagtatggtcaactggacattatgtataacaacgctggaactaacgacagcgttttggtgaagagcgtaacagagtatgatatggagcaattcgatcgagtgataaatgtaaa

SEQ ID NO: 1803 - DNA, 382 bp, Pinus radiata
attactttcagttttgcaagctggagatgactttgactgtccagtatgtttatcaccaccatcagaggctatcataaccatctgttcacatgtgttctgtaagaagtgcattgagaagacattgaaacatctaaagccacagtgtccattgtgccgtaagcagcttacagcatctgatctttttagttcaccaaaggttgctgacgagaatgaagttacatcagaaaaagtagccaaaactggttcaaaaattaatgcattaatagctctattgaaagagtcccaggatcatgatccaactacaaaatctgttgtattttcacaatttcgaaaaatgctggatctcttgcatgaacctttgaaaagtcaggcttctagtttg

SEQ ID NO: 1804 - DNA, 533 bp, Pinus radiata
atcgcctggaatttgtcttctgcaagataatattcaattaatctattgtcgaaggaaatttgagccgtataagaggataatcaaaagaagccggttgatttctccgggattaaaggatggatcaagaaaactggaacatcggagctgatggcactggctgccaagctccagaagggcacactctttgcgccaataactgcggcttttttggcagttcggcaacgagaaacctgtgttcgaaatgttacagggatctgattatgaaggaggcccaagcctcatctgcaatggccgccgttgagaagtcatttgccgcgggttctccgatggaggaggaggcccctctttccaagccagatgttttcgtcgaacaaagccgtgcaccgatctccccagccgtagtccaagcctcgtcagttcacttggctgatataggttcatcttcttctccacaacctcctgccgaaactcctaaccggtgcttctcctgcaggaaacgagtcggtctgaccggcttcaaatgtcggtgcgga

SEQ ID NO: 1805 - DNA, 549 bp, Pinus radiata
gagtgaggaagctgtagatgaaaagcgtgtaaatctgcagcaagcagaaggtccggaggagcccagggttgtaactgcgagcacattagaatccccaaaaagtacagaacaggagaatagtcttgaggttgaggaagctggtgacaaaaagctccaggcacatgtgaatgaaacgtctttgaatgcagatcaagaaaattccatcaaggagcttcacaacaagtatcctcgttactcggaagaacttttgacgaatatgctggctgatcaggatggcgatttgaaagagctagaagcactcttaaaaacattacaacgccaagagattagagctgctaatcgaaaaatgtcaggtccatcatcttcaaaggcaacagataacacagatgtttccacggaatcaccaccctcaaagctacagaatgcctctaagggcaaaaccagaggaaagagcgccaagaagagagaaagggatacaactttatccgtaggtagagttcacaaaacgcgtcgaaaaactgcttccgacgatgtgaaggccgcttctaa

SEQ ID NO: 1806 - DNA, 397 bp, Pinus radiata
gttttgggctctcatttgggagttacattcaaccaagctcatcacatggcgtccgagaaggaagctgctcttgctgccacaccaccagaagatgataaacctacaatatttgacaaaatactgcagaaggagattcccagtacagtggtttacgaggatgagaaggtacttgcattcagggatatcgcaccccaagcacctactcacatcattatcatccccaaagtaagggatggcttgactggcctatctaaggcagaagagaggcatgaggatattctaggtcacctgctatacactgcaaaagttattgcaaagcaggaaggtttatctgatggcttcagaattgtcattaacgatggtcctactggatgccaatctgtgtaccatttacata

SEQ ID NO: 1807 - DNA, 242 bp, Pinus radiata
caagatgggcagatcttcttgctgctcaaaagaagggctcaaccgtggggcctggaccaaaagggaggatatgattctctccgaatacattcgaattcatggcgatggcggatggagaaatatgcccaaaagagcaggtcttaaacggtgtggaaagagctgcagattacgatggctgaactatcttcgccccgacattaaacgtggaaacatttcccctgatgaggaggaactcataattc

SEQ ID NO: 1808 - DNA, 364 bp, Pinus radiata
  misc_feature (245)..(245): n is a, c, g, or t
caagagtaaacccgaaggaatagaaggggaaggaggcatcggcagcgttgttcctcctcctctcctctcctgcatttctcaaactcaaatacctctcctctcacaatcatggaaggcggagtcgtctttgaatctgtgcaaaacccactggatcgcctgaacactggaaatatggaccatggttgtgcccattacaggagacgatgtcggattcgggccccttgttgcaatgagatctatgattntaggcactgtcacaatgaagccatgagccatctaaaggaccccttgctgcgccatgagctcccaagatacaaagttgaacgggttatttgttctctctgtgacactgagcaaaatgtca

SEQ ID NO: 1809 - DNA, 265 bp, Pinus radiata
cttaagtttcagatgcctggtaattcttcttttccaactggaaacgctgccccatcaactaaaaatctttactattcatttgacttgggagttgtacatttcttgtatatgtccactgaaactaattttttagatggaagtgatcaatatgctttcatagagcaagatttgaaaaaggttgatagaaacaagactccatttgtagtatttcaaggtcaccgtcccatgtatacgactaactatgaactaaaagatgcgcctctaa

SEQ ID NO: 1810 - DNA, 346 bp, Pinus radiata
cttgaatcgatcttgcctgcttgtgccggagcgcgcacagtgtgtggtttgttctcgtttttcatcttaaagcggcggttgcaggaattgattgtgtgaggggacgagatgtgtgcagaggtaagtcagagtgccatggccgtgcacactatgcagatggcgagaatggaaatgaagcgtgaaataggagtctgtgagcaggaagcttcgtcggccgtgaaggaaacgcatttcagaggcgtgaggaaaaggccgtgggggagattcgcagcggaaattagagatcccttgaagaaaaccagagtctggctaggcacttttgacactgccgaagaagctgccgagc

SEQ ID NO: 1811 - DNA, 353 bp, Pinus radiata
  misc_feature (344)..(344): n is a, c, g, or t
cgaaactcgaatcgatatgctttgtggccggttcaaatatttgagctggcttagcttctctggttcagaaatggcggactaaagtaatagtgtgccccgaggtctggtgttcgaatctcgttggcgtgaaaggtcaaatttttctctcgagtttcattgattctgaaaaactggcatagctatggcgatgagcaatgggagattgtgtgaagatttggataggattaaggggccgtggagccccgaggaggacgcgtcgctgcagaggcttgttcagaaatacgggccgaggaactggaccctgataagtaaaggaatcccggggcgatccgggaaatcgtgcnagcttcggg

SEQ ID NO: 1812 - DNA, 185 bp, Pinus radiata
tcttgctgccacaccaccagaagatgataaacctacaatatttgacaaaatactgcagaaggagattcccagtacagtggtttacgaggatgagaaggtacttgcattcagggatatcgcaccccaacacctactcacatcattatcatccccaaagtaagggatggcttgactggcctatctaa

SEQ ID NO: 1813 - DNA, 337 bp, Pinus radiata
caataaatggccgaatgaattaatcaacgatgaaatgaattaatgaataagctattggatctaggaagggttttgaggctgaaagttttgggctctcatttgggagttacattcaaccaagctcatcatatggcgtccgagaaggaagctgctcttgctgccacaccaccagaagatgataaacctacaatatttgacaaaatactgcagaaggagattcccagtacagtggtttacgaggatgagaaggtacttgcattcagggatatcgcaccccaacacctactcacatcattatcatccccaaagtaagggatggcttgactggcctatctaa

SEQ ID NO: 1814 - DNA, 340 bp, Pinus radiata
gttcaagggagacgggatattcagagtccgatcgccgccatggccgtagacaccatacagatggcgagagtgggtgtaaaaatgaagatcggaggaggcggctgcgaggaagaggcgtcctcggctgtgaaggaaacgcatttcagaggagtgaggaaaaggccgtgggggagattcgctgccgagatcagagatcccttgaagaaaaccagagtctggctgggcacttttgacactgcagaggaggccgcccgagcctacgataacgctgccagaaattccgcggggccaaggcgaaaactaattttcttctgtctccccacaatgacattagcaccaa

SEQ ID NO: 1815 - DNA, 433 bp, Pinus radiata
ccgctatcctttccattacatcccacgttaggtcacggtttcgaacccttgcacggccattcttctgttaagatggtgagatctccctgctgcgacaaggttcataccaataacaaaggcgcctggaccaaagaagaagacgagcgtctcatagcacacattgaagcccacggcgagggctcatggcgttctcttcccaaggccgcagggctgctgcgatgtgggaagagctgcaggttgcgatggataaactacctgcgtcctgatctgaaacgcggaagcttttcagaagaagaagacgatctcatcatcaaactccactccctcctcggcaacaagtggtcgcttattgcagggagattgccagggcgaacggacaaccgaaaataaaaaattactggaacacgcacatgaaaaggaaattgttgagcag

SEQ ID NO: 1816 - DNA, 225 bp, Pinus radiata
atcacagtcggcctctgatcaaagaagaagccgaatcaaggtgataattctgcaaattctgcagatgtagaaactcttcttcctcaggttgatgaaacagcttctgctgatctgacagtgttcccaggttttgttaccccttatgtaccatacgggttccccatatggcacacttttagacccacaataactcaaacttccaatgtttataagccaacagctgta

SEQ ID NO: 1817 - DNA, 337 bp, Pinus radiata; identical to SEQ ID NO: 475

SEQ ID NO: 1818 - DNA, 390 bp, Pinus radiata
gtttgttcgaacgatgaaaaccagctaaaacaaagcgcagggattggcaggattcgagcagtggtccttggggcggagttgatagaagaagaagaaacctaccatatacacatacatatattatatacatagacacatgggggctccgaagcagaaatggacttccgaagaggagggagctctcaaagcaggtgttgagaagtatggcactggcaagtggcggaccattcagaaggaccctgagtttggacactgcctcgccgctcgttccaatgtggatttgaaggataagtggcgcaatatgagtgtgagtgctagtggccaaggttcaagggataaggtaaagactccaagagtaaaagctattgcctctctgccttattcatcaag

SEQ ID NO: 1819 - DNA, 367 bp, Pinus radiata
attcaaaatgggaaagaagttggagctgaaacgcatccaaaaccctaatagttcacgtgattccttctccaaatgcaagaggggactgctaaagaaatcggtcaagctctttgttctctgtgatgctgaagtttccctcatcattttatctgaaaccgccaagatttacgagtttgcaagcaacaagtcgtgactagctcttgtgaattcttctgatcaagttagagatccatatactgatatataaaagcatactttcacattgcaattggagcagatctagatgcagaagtgcaaccttattatacctaaaggccatcagctgcaaatcaagacccattttctatcttttgagatcgtgatacag

SEQ ID NO: 1820 - DNA, 487 bp, Pinus radiata; identical to SEQ ID NO: 534

SEQ ID NO: 1821 - DNA, 319 bp, Pinus radiata
tttaagcatttcattgagtcttaggtcacggtttccaatcctggcaggtctcattattctgtctctctggcaagatggggagaactccctgctgtgaaaaaggtcatacaaacaaaggcgcgtggaccaaagaagaggacgatcgcctcatcgctcacattcgagcccacggcgaaggccgctggcgttcgcttcccaaggccgcagggctgatgcgatgcgggaagagttgcaggctccgatggataaactacttgcgtccagtctcaagcgtggaaacttctcagaagaagaagatgagttcatcatcaaactccac

SEQ ID NO: 1822 - DNA, 320 bp, Pinus radiata; identical to SEQ ID NO: 507

SEQ ID NO: 1823 - DNA, 338 bp, Pinus radiata
gtcgagctccttgctgcgagaaaacccatacaaacaaaggcgcctggagtaaagatgaagatgaagcactcgttgcatatattcaagcccatggagaaggcagttggcgttcccttcccaaggccgctgggttgcagcggtgtggcaaaagctgcaggcttagatggataaattatctccgtcctgacctcaaacggggcaatttcagcccagaagaagatgagatcattatcaaacttcattctatgttgggtaacaagtggtctttgatcgcaagcaaattgccagggcgaacagataatgagataaagaattactggaacactcacattaagaga

SEQ ID NO: 1824 - DNA, 332 bp, Pinus radiata
gccgaggtgaggaggcattacgagcttcttgttgaggatgtgactgtgattgagtctggccgggttgctttgcctgcttattctgaaaattcgtatacaccgcccgaattgatgtcagatcagttgggcgatctcacaaaacagcaggcggtttctgtgaaggctccctcggccaaggcatccgaacaggagcgcaaaaagggcgtgccctggactgaagaagagcacagactcttcttgatgggattgaataaatatggcaaaggtgattggagaagcatatcaagaaactttgtggtctcacggacacctactcaagttgcaagccacgc

SEQ ID NO: 1825 - DNA, 301 bp, Pinus radiata
accgtcgagagagcttcatatctaaccaataataacacctgtatggcttcatagcttcacagcaacagggcaccatgggccgagctccttgctgggataaaatgggagtaaagaaaggcgcctggactctagacgaagataaaatactcgtcgattacattaccaaacatggccatggcaactggcgcgcactgcccaagcaagcagggctcctgcgatgtggaaagagttgtcgcctgcggtggacgaactacctgatacccgacatcaaaagagggaattttattccagaagaggaata

SEQ ID NO: 1826 - DNA, 498 bp, Pinus radiata
tttgcatccaattcttcctgtatcatctaattgctcagtctagcaattacgcaatctcggtccccagtcatgtctgacgaagaggttaatgcaactgctgcctctgtgggcaatctgaccttgctgctgcatgcatctcagcgacgattggaaggcaaggtcgcaataataacgggcggagcatctggcataggagaaggcatcgttcggctcttcacaaagcacggagccagagtcataatcgcagacattgcagatgaaaccggcaaaattctggccgaatccctttcgcctccggccacttacgtgcgctgcgatgtgagcaaagagcaagacgtcagcgctgcggtggatttggccatggagaagtacgcgcagctggatatcatgtttaacaacgcaggaatcgtcgatacggttaatgtttcaaggggagtggcagagtacgagatggagcagttcgaccgagttatgagcgtcaacgtcagaggggtgatg

SEQ ID NO: 1827 - DNA, 551 bp, Pinus radiata
cgtggctcttcccggcagacctagtaagccgactactgtaaatttattcttttagggttacagaagaagaaaatacaagatgggcagatctccttgctgctcaaaagaagggctcaaccgtggggcctggaccaaaagggaggatatgattctctccgaatacattcgaattcatggcgatggcggatggagaaatatgcccaaaagagcaggtcttaaacggtgtggaaagagctgcagattacgatggctgaactatcttcgccccgacattaaacgtggaaacatttcccctgatgaggaggaactcataattcggctccatcgccttcttggcaatcgatggtcgcttatagcaggaagattaccaggtcgaacagacaacgaaatcaagaactactggaacactcatatgagcaagaagctgcttccattgaacgaatctgaacccaagactttgcctgtccccaagaggaggtcgcaatctccttctcccctgcaaaatcgagtctttaaagccaaccctgtgaaaataacaacggtggtcagtc

SEQ ID NO: 1828 - DNA, 256 bp, Pinus radiata
ctgaaattcggatgccgaaatcccatgagaagatatggctgggatcctataataccgccgagcaagccgcccgtgcttacgacgccgctgtgtattgtctgagaggacccgccgccaaactcaattttccagaaaccgtgccgggtattccgtctgcgtcttccctttcccggcagcaaattcagcatgcagccaccagatatgccttgggtgaaatccctttgatttcgccctctctgcaaaatattgactcgag

SEQ ID NO: 1829 - DNA, 372 bp, Pinus radiata
gcagattctcaacagaattgggaaagttttgtgaatattgaagatggctcagtgccatgaaatcattgaaagtcgttgcagagacagccatggcgcatcagatctgaagctgtttgccatggccgcggttctggtgacgagcaccggaggagtatgtttgccggttctgtttgccagatattcccgagggctcaaattttacggcactcttctggtactggtgaaatgtttcgctgccggagtgattctgtccacaggatttgtccacgtcatgccggaagccttccgcgctctggaaagcgactgcctgccggatcatccatggcaccagttcccgttcgccggactcgtggccatggccggggcaatcct

SEQ ID NO: 1830 - DNA, 486 bp, Pinus radiata
agcgggtggtgatttagccgagggcgaagaggaggacgaagaagggcttcgtaacaaacgtggcgattgatcctaccttagcctgaaaatgctgtcaggaggctacgcaaccagatccgacactactactgtcaacaacggatccgctaatggcccaataggaagtgctcccccaagaattaactcgatacaaaataataatccaggagctgtcaggcctggctggggaaccatgccccttcacatgaatccttatcatccccaatcaatgcctcttccgccccccaatggtatgcagggtcagcttgtttgcagtggatgtagaactcttcttgtttatccgcaaggtgcaccaaatgtttgctgtgcagtatgcaacacagtcactccagttccacctcctgggacagaaatggctcagctaatctgtggacgttgtcgtacattgctaatgtatgttcgtggagcaactagtgttcagtgctc

SEQ ID NO: 1831 - DNA, 330 bp, Pinus radiata
gtttttccgcaggaagttttgatttgagtaggaaatcctttggcctcctggagctttgatttgctcaggaaaccctagcccttcggttcctgaagctttgcttttcgtaggaaaccctttggcaccggtaggcgatggctcccagcaacaacagaagagacgacaatggagcacgaggagttcacttcaggggcgtcaggaagaggccctggggtcgatacgcggcggagattagggatccatggaaaaaagttcgtctttggctcggcacctttgacacggccgaggaagccgcccgggcttatgacactgccgctatctccctcagag

SEQ ID NO: 1832 - DNA, 413 bp, Pinus radiata; identical to SEQ ID NO: 584

SEQ ID NO: 1833 - DNA, 260 bp, Pinus radiata; identical to SEQ ID NO: 351

SEQ ID NO: 1834 - DNA, 338 bp, Pinus radiata
aattgaatcggccatggttttgtatgaattgttacatgtacagcagattcagcaaatacagcagcagcagtttcaattgcaacaacaacaaatagcagcagcggcttcaatccaccatatgggtcgaaaccctctgggtcccagagctcagcccatgaaacttcatggcagcagcctatcaaagccggctaagctttacagaggcgtgaggcagcgccactggggtaaatgggttgcagagatcaggttacccagaaacagaaccaggttatggctggggacttttgatactgcagaggaagcggccatggcttatgacaaggctgcttacaggctga

SEQ ID NO: 1835 - DNA, 240 bp, Pinus radiata
gcttattggaatgcctgacactaactatggaagcgaacagacaaatgcttgcaaaaaacagaaaagaatacgttccaaggattcaggagaagatggtgaagatagacagagataacatcctttcattgttactgagcccggtgaacttgcaagagggaaaaagaatgggttagactatctctttgatctttatgaacagtgcgggaaatttctgctggatgtgcaacatattgcgaagga

SEQ ID NO: 1836 - DNA, 349 bp, Pinus radiata
gataaatccagatgaggttttagcagtcaactttgcattccaactgcatcacatgcccgatgaaagtgtgtctacaaagaacctacgtgaccggcttctaaggatggtgaagtctctcaaccctaaagtggtcacagttgtagaacaagaggttaacactaatactgcacctttcttaccccggttcatggaagcattaaactattactcatcagtgtttgagtctctagatgctacaattccaagggatagtagagatcgtatgaatgttgaaaaacagtgccttgcccgagacatagtgaacataattgctttgtgagggggaagaaagggttgagaggtatgaagt

SEQ ID NO: 1837 - DNA, 457 bp, Pinus radiata
gaaaagtatgttcaagttttttccattcaaacatatccttgttggagggattcggaaccgtctccggtcgtcttcaaccagtctgaccccaactcgcagtctcttgtactctcaaagtataaatttttcaagaatggctaattcgaatcgaggatgcttcatatgcggttctgaggatcatcgaaaagcggactgtcccacacccgacaaacttacctgttatcagtgcggtggagtgggccatcagtctcgggactgctcttcctccgagaagcgcaaaacctgctacaaatgtggtgaagagggccatatctctcgcgactgttccaatgcgccaacctctgagtattccggtggtaattccggcaccgaatgttataaatgtggtaaattgggtcatatctctcgctcctgtccgacaaatgagtcaactgctgactatgctagggctcctagc

SEQ ID NO: 1838 - DNA, 395 bp, Pinus radiata
ctgaaatatcgttaaattcactcttttggtctcagttactgcgtcgccaatatggaaaatctccccaatcagcaacctgaccttgaaattgctcaaacacacgaggatcccgggtcccgccaatttaagggaattcgactgcgaaaatggggaaggtgggtatcggaaatccggatacccaaatctcgagagaaaatatggctgggctcttacacgactcccgagcaggctgcccgtgcttacgacgccgcagtgtattgtctgaaagggcccaacgccaaattcaactttccggaaaccgtgcacgacattccgtctgtgacttctgtttcccgtcaggaaattcagcacgcctccctcaaatatgccttgggccagccccctccgagtttgca

SEQ ID NO: 1839 - DNA, 395 bp, Pinus radiata
gctaacacagcccttatatatcatcatgggaagcttcttgcacttcaagaggcagataaaccttatgcacttagagtccttgaggatggtgatttgcaaactcttgggctaatggattatgataataaattagcacactccttcactgcacatccaaaggttgaccctgttacaggggagatgtttacatttggttaccaacacaagcctccctatttaacttaccgggttgttacaaaggagggaataatgcttgatccagttcctataacacttcccaaacctgtcatgatgcatgactttgccataactgataactatgcaatcttcatggatcttcctctctatttttctccaaaggatatggtaaaaggtggactcatcatgtcttatga

SEQ ID NO: 1840 - DNA, 468 bp, Pinus radiata
ctcatttcagtgattcactcactgaaattattgttagaatcactgttttggccccagagcttctgcgtcgccaaatatggagatacgcctccagcaggaaaacgaccaggacattgctccgccacacgaagatcgcgtgtcccgccaatttaaaggagtccgaccgcgtaaatgggggatatgggtatcggaaatccggatgccgagatctcgacagaaaatatggctgggctcgtacaaaaagcccgagcaggccgcccgcgcctacgacgccgcagtgtattgtctgagagggtcgaacgccaagttcaatttccccaattctgtgcccgacattccgtctgcgtcttctctttcccgccagcagattcaactcgctgccgccaaatatgcgttggatcagtccccttcaagcccgccgtctctgaacaataataaagaggaacccgcgtcaccgtcgcagtcgtc

SEQ ID NO: 1841 - DNA, 378 bp, Pinus radiata
aaacaatacagtcgacattgttgcagcatctagagctattcgtgaaccacgtgtagtggtacaaacaaccagtgaaattgacatccttgatgatggatatcgatggcgcaagtatgggcagaaggtggtgaaaggaaatccaaatccaaggagttactataaatgcacaaatgctggatgtccagtgaggaaacatgtggaaagagcatcacatgatccaaaagcggtgatcacaacatatgaaggaaagcataaccatgatgtgcctgctgccagaaacagcagccatgataatgctgcaaaagggaatggggcagctcctctagcaatgcagaataatgtcccagcgcctatgaatgctataccacgacctgttcc

SEQ ID NO: 1842 - DNA, 382 bp, Pinus radiata; identical to SEQ ID NO: 455

SEQ ID NO: 1843 - DNA, 314 bp, Pinus radiata
catagaaagagctttatgtgtcctgaatttgaaccctctcctcgttttaaagaatccgagctttgcaaacacgccttgagctagactccggaataccccagcaacaatccgacatggctaaatcctcgcaaaaccagaacccccgcaacagacgcgaaaaccgcttacggaagtcacggcagttcaagggaatacgaatgagaaaatgggggaaatgggtgtcggaaattcgaatgcccaattccactgggagaatttggctaggctcttatgacacgccggaaatggctgcccgcgcctacgattttgcccgg

SEQ ID NO: 1844 - DNA, 384 bp, Pinus radiata
ccggttcctagttcgaatccttgccctaacgcagtcccgtgttttaagactcaatctttagtgactcccccgcaacatggttaagcccttgccaaaacagagcagcccgagcggatcggaaaactgccaaataaagtcgcggcagttcaaaggaatccgactgagaaaatgggggaaatgggtgtcggaaattagaatgccgaattccagggccaaaatctggctgggctcctacgactccccggaaaaagctgcccgcgcctacgactttgcgttgtactgtctaagagggtcgaaggccacattcaattttcccgactccccgccggaaattccatgcgcctctgacctgtcgccgccgcaaattcaagccgccgcggccag

SEQ ID NO: 1845 - DNA, 171 bp, Pinus radiata
acatcccgtcttcactttgttgatcaacaattacgacaacagcgagctcttcagcagctaggaatgatacagcagcatgcctggagaccacaaagagggcttccagagagggccgtttctattctccgggcttggctatttgagcatttccttcatccgtaccccaaaaat

SEQ ID NO: 1846 - DNA, 436 bp, Pinus radiata
agattgatcaaacacaaataccgtaaaatcgcagcgaagatccaaaattccaccatggggactgtggcggaagatggcagcaagggttacacggccgtaaatccccatcccaaaaagggcgtcgcctcgtggctggtggacatggtggagaaactggtggttgaaacttctgcgttgtatagttcgaagaagcctctgcattttcttttggggaacttcgctccagtctcggaaactgcccccaaatcgcacctgcatgttgttgggcaacttcctagttgcttggatggagagttcgtgcgcgttggtcccaatccgaaattcgcaccggtagctggctatcactggtttgatggagatggaatgatccatggtctgagaattaaagatggtaaagccacatatgtgtcacgttatgtgaagacatcacgcttga

SEQ ID NO: 1847 - DNA, 303 bp, Pinus radiata
ggaggcgagccattctttgttccccgctcctcggatcctgcggcgccggaagacgatggctacatcctcacattcatgcacaacgaggagacctcgaagtcggagcttcttattttggacgccagatctccgaccctggaacccgtggcaacggtaaagctgccgtccagagtcccatacggattccacggcacattcatcacttctgaagagcttgccaagcaggtgccgtgaagacgcgctgtcttccgcccttcttgctttcttgattaccctacaacacctggttctgtactttcttta

SEQ ID NO: 1848 - DNA, 551 bp, Pinus radiata
gcgatttcgagtgctgtaagcaggcaacgacgcctgttttgctttagagtttaacagaaaagaagaatgtgtggaggtgctatcatctcggactttataataccccctgcgagccgaggccgccgggtgactgccagggatatatggcccgattttgataagttctctgagtttattaatggaggtgctgcggtggagtcctttgatgtcagcgttgatgtcgatgacgacgaggaggattccgacgatgacgagttcctcgattttgaggagagctatcagaacaagaagaagaagcagcaacagccgatatcccccaccaagggtttcgagcttcctttagctcggggtcttgatggaccggcggccaagagcgcggtgagaaagaggaagaatttgttcagagggatcaggcaacgtccatgggggaaatgggctgcagagatcagggatcccagaaaaggcgctagggtttggctgggtacctttaatacggcggaggaagctgctcgggcttatgatgcagctgcacgaaagatcagaggtaagaa

SEQ ID NO: 1849 - DNA, 527 bp, Pinus radiata
gaacagtcgagcctcgttgcaccctcctcagtcaccacaaacagcactgcagcgaaaggacaagggcctgctgatactgagtctcaaccagacctaactgctgccgagaagccttcaatggagcccaagaaaccgccaagaaagaaaggtcagaaacgaaacagggagcccagatttgcattcatgaccaaaagtgatgtggatcatttggaagatggctatagatggcgcaaatatggccaaaaggctgtcaaaaacagccctttccccaggagttactatcgttgcacaaatggaaaatgctcagtgaagaagagagtggagcgttcgtcagaagatccaggaattgtgattacgacatatgaaggacagcattctcatccaagcccggccatattgcgtgggtcagcagaatcccaatcccacttttcagatcaaagattgaattctcccttcactcaaacgccattgatcagattccctccccacccaatgatgatgagtagtactaaccaggtcccagctgc

SEQ ID NO: 1850 - DNA, 226 bp, Pinus radiata
gagagaaggtggaagtacagcaatagaaagtgacttgaaaagtgaaaatcttgaagaaaaagaagcgaaggcaagtgaaaatgaagataagatgctgaaaaaaccagacaaattgttaccttgtcctcgctgtgacagtttagataccaaattctgctattacaataattacaatgtgaaccagcctaggcatttctgtaaaaattgccagagatattggactgct

SEQ ID NO: 1851 - DNA, 236 bp, Pinus radiata
atggccggagaccacgcttgccccgtctgccaagcgacttttactcgcccgcaacatgtcgcacgacacatgcgctcccacaccggcgaccgcccgtacaagtgctccatctgcaccgactcgtttggccgcagcgacctcctgaagcgacatgagaagaagatgcactcaaacgggcagagcgcagcgagcacgcccactgggccagggcagaacaaatttgatagccagtttac

SEQ ID NO: 1852 - DNA, 455 bp, Pinus radiata
ccacaacgaataaatgcaaatgctgttctggatagctgaacccaccaactcatcagcataaatttctccagcagaaatccagcctcccactcgcgcgcataaatttcttcaacggaaatccagccggccgctaaattctctgcactgacaaaagcccacaggctaacagattccgacatggatcgccccattccctggccatctgcatacacagaaatctagactttgaaaatctttctaaattctgtatggagccctgaactgtaggtgcagggttcgattaccgctatggatgaggccgcgcctgccaaggctcctctcccctgtgactactgtggcgaagcgaatgcagttctctactgccgagctgactccgccaagctctgcctgccatgtgaccaccacgtccattctgccaatgccctgtccaagaagcatgtccgatcccagctctg

SEQ ID NO: 1853 - DNA, 324 bp, Pinus radiata
cttgaatgttgttgcatgtgagggatcagaaagattggaaaggccagaaacttacaaacagtggcagggacggactcagcgtgctggatttgtacagcttcctctggatcgtagtattctctctaaatccagggataaggtaaaaaccatttctatcataaggattttggagtggacgaagatggtaattggatgctattgggctggaagggaagaactattcatgctctgtctacgtggagaccttcgacatgatttggcgatggagaatttttctctctgcaaagagtaaggcatgatacatatttgtgattctgccaaggc

SEQ ID NO: 1854 - DNA, 316 bp, Pinus radiata
acgggctctccaacaattaggcatgattcagcagcatgcttggaggccacagagaggacttcccgagcgatctgtttctgtcttacgggcttggctatttgaacattttcttcatccgtatccaaaagatgcagacaaacatatgctcgcgagacagactgggcttaccagaaatcaggtctcaaattggtttataaatgcacgtgtacgcctctggaagcctatggtggaagagatgtatgtggaggaaacaaaggaggcagaagtagaccatggatcaaatgataaaacaggtaaggagagtggcgagaaaaaa

SEQ ID NO: 1855 - DNA, 393 bp, Pinus radiata
cggaaaatcacccccttgcgttgcgcaccatcgccccgacgtaccgaagtagcggacacggttccgtaatattgtacaggcgcgcgcccacccccacagcgacgacagacacacattctttaacgatccatctccttcttgacgaaacctccacccccaacgattgacgatgcccaaggcggacagccagagcggatcccgagattctacggtcggccccgctcaaggtacgctgaagcggaaccaggcgtgccaccaatgtaggaagcggaaactgaaatgcgacgccaaaagaccttgctcgacttgtgtgaggtcacacaaccacgccatcacccacgctggtccagacgctgttttgccgcccttcccagaatgtacctttgacgaagt

SEQ ID NO: 1856 - DNA, 359 bp, Pinus radiata; identical to SEQ ID NO: 563

SEQ ID NO: 1857 - DNA, 459 bp, Pinus radiata
ggaaggcaatgagagtgatctcctcaagggaatgaagaaggcaaggcgtgagagaggatcaacagcaaaggaacggattagtaaaatgcctccctgtgctgctggaaaacggagttctatctacagaggcgtcacaaggcatagatggacaggacgatatgaagctcatctttgggacaaaagtacttggaaccagaaccaaaataaaaagggcaagcaagtgtacctaggtgcctatgatgaggaggaggctgcagccagagcttatgaccttgccgctctgaaatattggggtcctggaactctcattaattttcctgttagtgactatgctagagatattgaagagatgcagagcatttcaagggaagatttcctggcttctctcagacggaaaagtagtgggttttcaaggggaatgtcaaaatacccgtggactggccaagcaatcacaaactg

SEQ ID NO: 1858 - DNA, 368 bp, Pinus radiata
  misc_feature (141)..(141): n is a, c, g, or t
aaaaaggcgtcagaatggggtgagtctgtagtaagtacaagcgaaaacagtaatgacttggatcctcctacttattctgaaacctcttcccctgctcaaggatctgatcctcgggttttcccctgtaatttctgtcaaagnaaattctacagttctcaagcattaggaggtcatcaaaatgcccataagcgtgagagaactttggctagaagggcacagagaatggggtcttttgcacaaagatattcaagcatggcatcacttccactccacggttcctcggaaacaagttggacgcccagtcggtttttagggataaaagcacattctttgattcacaaacctttccctgaaggtgataacctgcc

SEQ ID NO: 1859 - DNA, 497 bp, Pinus radiata
ggcaagaccgtctggaagaggatgttacgggaagagagcaaaagcgttaccgtgtctgcgacccggagctttcggagcgaaccgtggtagtaatgggggcagacccgcacgaatccggagtccgtctcgtgcacacgctgatggcctgcgcagaagcggtgcagcgcggtaatttggccatcgcgcgggaaatggtgaaagaagtgagaattctggcttcagcacagggcggggcaatgagcaaggtcgccacatattttgccgaggctcttgcccggcgaatctatgggtttctccctcaggacaccttgcggttcaaccagaacgaccccttgtccgattttctgcaatttcatttctaccaaacctgcccctatctcaaattcgcgcacttcatagccaaccaggccattctggatgccttctccgggcaccaacaggttcatgtcatagatttcaatctgaaacaggggatccaatggccggccttgatacag

SEQ ID NO: 1860 - DNA, 254 bp, Pinus radiata
gagtaggaggcggcggcggaggcaagggaagcccgtacagaggcgtcaggatgagaaaatggggaaaatgggtttctgaagtgagggagccgaacaagcggtctcgcatatggctcggctcctattccactcccgaggccgctgccagggcctatgatactgccgttttctacctcagaggaccctccgcgactctcaatttccccgaggaagcacgtaaggagcagcagagcgacctcaggctttcgcagctc

SEQ ID NO: 1861 - DNA, 515 bp, Pinus radiata
catcttctccttacaaaagtagctcccctcttgactccaggcggtcttcccagtccataacgatacggattacacccacgcaccccatgtcttccacctcatcgtattcttctccctcccctgacacaccatcacagtctgccgctgtgcgcccgacatctacccgagacgattcttccgtcatggaacctccacgtaagcgagccagggctgatcttaacgctgaacagcgaagagaggccagggcccaccgtaatcgaattgccgctcaaaactctcgcgataaacgcaaggcgcaattcacttacatggagcagcgcgtggcacaactggaggaagagaaccaacgactacgagcaggcatgggcctctctcaattcacgccagccgacaacgacaagttcgtcagcctcgagagagaatcagtacaggcccgcgagaacagagagctcaaggagaggatcaagagtctagagagcgggtggtcggccgtcatcaaagcgttgcaggcctca

SEQ ID NO: 1862 - DNA, 532 bp, Pinus radiata
agtttgctgctctacacctgtggttgcaagcgtttggagcttcaagaggcaaggtttggtctgtgattaattcatggcggcggcggcgacgactacgttgggttgtgcgaaggtggatttgatacggctcatgcggctgcgagagcttacgacagggcagctatcaagtttcgaggagttgaagctgatataaattttactctcaccgactatcaagaagatttagaccagacgagcaagctctctaaagaagagtttgtgcatattctccgtcgtcaaagtactggtttctctcgtggaagttccaagtatagaggcgttaccctgcacaagtgtgggcgatgggaagccagaatgggtcaattcctaggaaaaaagtatatatatttgggattatttgacagtgaagaggaggctgcaagggcatatgataaggctgctatcaggtgcaatggaaaggaggcagtaacgaactttgatcctagcttatatgaaaaagaaattcttgaagaaagaagagagagtcagactt

SEQ ID NO: 1863 - DNA, 497 bp, Pinus radiata
  misc_feature (10)..(10): n is a, c, g, or t
ggcacgagcncttctgattttttggccgagggttcgttgcagaaaggccaagggcaagtaggaggcgatagacctacttgaaaatggaggtgtctgcgaagaagcgaaaggccgaagaagcgaatggcgtggtcgatatagccgtggaagatgctcggaaaatgttggaacccttcacccgagagcaactattagatattctgcaggaggcggcgacgcagcacctggacgtattggagcaggtgcgcgccatcgcggacaaggatcctgcgcagagaaagctgttcgtccgtggccttggctgggatacaaatacagagtctctcaaggccctcttttcccagttcggggaactggaggaaggggtcgtcattatggacaagaacaccggtaagagtaagggttacggattcgttactttcaagcacatggacggtgctcttaatgccctaaaggagcccagcaagaagatcgacggccgcatgactgtcagtcag

SEQ ID NO: 1864 - DNA, 308 bp, Pinus radiata
tgcttagatggagtttacgtccgaaatggagcgaatccccggttcaaaccccgaggaggccaccatttatttgacggcgatggaatgatacatgccgtgacgctgcgacacgggaaggctagttacagttgccggttcacggagcccgaaaaggctcattagcgaggaacgggcggggcggcagttttacccgaagcccatcgggcaactccacggccacggacgggctggtgcgcctgctgctgcatggtgcccgggggctctgcgggactggtcaacaccgggaagggcatgggcgtggctaatac

SEQ ID NO: 1865 - DNA, 395 bp, Pinus radiata
aagcggtggcagattgttcacaatgatttcaagtggcgctctttcttctgcagcagagattttgaaggcatatcagctgctcttggttgctactcctttcaagaaaatatctcattttatgacttatcaaacggttcttaatgtagcagagggagaaacgaggttgcacattgttgatttcggaattctgtatggtttccaatggccttctctgattcaatgtctggcaaatcgtcctggtggtcctcccatgcttcgcataactggaatcgagtttccccaacctggatttagaccagcagagagaattgaagagactgggcgcagactggaagactatgcaaaatctttcggtgtgccctttgaataccaggctattgcaacaaagtgggaga

SEQ ID NO: 1866 - DNA, 340 bp, Pinus radiata
gttaacttgaaaattgaacacttctcacccagcagttctgatatggaaaaactggagatcgaagagttggggagtccccagggtgatgtaaaatctttgcttattgaatgtgctaaagctattgcagacggtcgtaatgcagataatttgattgcagggctgagacaagttgtaaatatatatggggatccattgcataggttagctgcatatatggtagaaggtcttgtagcaaggttgcatttctcaggaggacatatttacaaaaccctaaaatgcaaggagcctaccagttccgaactcctttcttacatgcatattctatatgaagtttgtccct

SEQ ID NO: 1867 - DNA, 398 bp, Pinus radiata
  misc_feature (178)..(178): n is a, c, g, or t
  misc_feature (182)..(182): n is a, c, g, or t
  misc_feature (251)..(251): n is a, c, g, or t
  misc_feature (291)..(291): n is a, c, g, or t
cttttcaagaagtggaaaagggtgcaaagtggaaccctttccagaagctggcggccgcagttcttgatgcggcggaggacaccctggttcgtccgcttgagaagcaacgcccgttgcccaacacatccgacccaacggttcaactgtgcggcaacttcgcgccggtgccggaaacgcnagtnaagcatgacctggaggtcgagggccgggtaccggagtgcttagatggagtttacgtccgcaatggcgcnaatccccggttcaaaccccgcggcggccaccatttatttnacggcgatggaatgatacatgccgtgacgctgagacacgggaaggctagttacagttgccggttcacggagaccgaaaggctcgttagcgaggagcgggcggggcgg

SEQ ID NO: 1868 - DNA, 200 bp, Pinus radiata
aattgcaaatcttgacagttcaatcggtaaatcaatgaaaagcatctcagatttatcacccatgtgctaattctatgagtggtttttgtttggtgtaggagcgcactgcattctacttcggaaaaaaatatggatgcagagcactttcctgtaggtttctttaggtgggataagagaccagcaccagttgtagcggcagc

SEQ ID NO: 1869 - DNA, 286 bp, Pinus radiata
ggatagtgcagagcggctgaacgtggagaagcacttcttcgcagagaaaataatggggattgtagcttttgagggagccgaaagaaaaatcagactggaaggaagagatcagtggcgtattgtgatggaatcagcgggattcaaatttaccaatttaagtcattatgcaaggagccaagctcgaattcttctctataattattgtgaagcgtattctctagatgaatcgtcggggtttctctctttggcatggcaaaatcggcccctcctcaccgtcctcagcctg

SEQ ID NO: 1870 - DNA, 301 bp, Pinus radiata
  misc_feature (160)..(160): n is a, c, g, or t
  misc_feature (203)..(203): n is a, c, g, or t
  misc_feature (230)..(230): n is a, c, g, or t
ctatacctccgcctcttgtcaatttcaggctctttcttcctgatttttcagacagtgtacagtcgcgatattcacacaaggccgccattatcatctatctttcaagaagcagtagaccaaacaagcaaaagcggaaaaactatgggaaagaagaagaggnaggcccccaaggtctggtgttattactgtgagcgcgagttcgntgatgaaaagatattggttcagcaccngaaggccaaacatttcaagtgccatgtctgccacaagaagttgtctacccgctggaggcatggccatccat

SEQ ID NO: 1871 - DNA, 301 bp, Pinus radiata; identical to SEQ ID NO: 461

SEQ ID NO: 1872 - DNA, 447 bp, Pinus radiata; identical to SEQ ID NO: 570

SEQ ID NO: 1873 - DNA, 311 bp, Pinus radiata
gaagatggcagcaagggttacaaggccgtaaatccccatcccaaaaagggcgtcgcctcgtggctggtggacatggtggagaaactggtggttgaaacttctgcgttgtatagttcgaagaagcctctgcattttcttttggggaacttcgctccagtctcggaaactgcccccaaatcgcacctgcctgttgttgggcaacttcctagttgcttggatggagagttcgtgcgcgttggtcccaatccgaaattcgcaccggtagctggctatcactggtttgatggagatggaatgatccatggtctcag

SEQ ID NO: 1874 - DNA, 383 bp, Pinus radiata; identical to SEQ ID NO: 401

SEQ ID NO: 1875 - DNA, 235 bp, Pinus radiata
agagattcaggggtgtgaggaggagatcgtgggggaaatgggtagcggagatcaggatgctccgatgccgatcccgcgtatggttgggatcctaccacactgcagaacaggcagctcgtgcctatgatgctgcctctttctgcctacgaggtcctgctgctttcctcaacttccctgaatctccacctgctcagtttctcccatatcccctgcgccctcttcatgatattcatct

SEQ ID NO: 1876 - DNA, 416 bp, Pinus radiata
gattgtatgagatatcagaaaataaaactgattttaattctgcaggcatctcagaaaaacaaaactggctttacttctacaggcatctcagaaaataaaactggttttacttctgcacagatgtcagaataacaaaactcgttttacttttgcagacatctcagacaataaaactggttggttttagtacttgcccagacatctgagaaaaacaaaaccggttttacttctgccgccggtaaggttttacaagcttgaattcaaactttataatcgggcgctgtttatatgtccaacggaaaatgtgaggtcctacacacgctgacgcgcgagctcgtcgccagttataaacgtaccatggaagccgtagggcacccgggagggcagtttgacggaggccacgacgtcgaggcccg

SEQ ID NO: 1877 - DNA, 320 bp, Pinus radiata
  misc_feature (32)..(32): n is a, c, g, or t
  misc_feature (231)..(231): n is a, c, g, or t
gcacaatgttgaagggtgggatagagggtctnatgttgatcacaaagagtttctcagagggattggagggtggagaatgagtatgccaaagctctgtgatgtttgtcaggtatcaagctctgtaatatattgcagagctcatactgcacagctttgcttagtctgtgatgctaaaattcatggtggtagcaaggcttcgttgtgtcatgaaagagtttgggtttgtgaagnatgtgagcaggccccagctgtggttacatgcaaggcagatgcagcagctttatgtgtagcctgtgatactgatattcattctgccaatc

SEQ ID NO: 1878 - DNA, 456 bp, Pinus radiata
ctttggatttcatgggctcatttcactgactccgccgtgaaatatcactaatttcgcttcagagtttctgcaatattgccaaatatggagaattttcccgagcaggaacctgataatgccattgctctaccacacgaagatcgcggttcccgccaatttaagggaatccgactgcgaaaatgggggagctgggcatctgaaatccggataccgagatccagaaagaagatatggcttggctcatacactaccccggagcaggctgcccgcgcttacgacgccgcagtgtattgtctgagagggcgcaatgccgaattcaacttttctgtccctgacattccgactccgtcccccctttcccgtgagcaaattcagcatgccgccgccgaatatgcgttgagccaggccccttcgagtttggcctctttcataggttccccctcgcagtcgtcttcg

SEQ ID NO: 1879 - DNA, 491 bp, Pinus radiata
ccggagtgcttagatggagtttacgtccgcaatggcgcgaatccccggttcaaaccccgcggcggccaccatttatttgacggcgatggaatgatacatgccgtgacgctgagacacgggaaggctagttacagttgccggttcacggagaccgaaaggctcgttagcgaggagcgggcggggcggagcttttacccgaagcccatcgggcaactccacggccacggcgggctggtgcgcctgctgctgcatggtgcccgggggctctgcgggctggtcaacaccgggaagggcatgggcgtggctaatgccgggctggccttctttaacggccgtctgctcgctatgtccgaagacgatctcccgtatgccgtcagggtgacgggtgacggcgatctggtgacgacgggcaggttcgatttcgacgggcagcttcacgggtcgtcatcggtcaccgcgcaccccagcattgaccccgacacgggcgagct

SEQ ID NO: 1880 - DNA, 310 bp, Pinus radiata; identical to SEQ ID NO: 554

SEQ ID NO: 1881 - DNA, 251 bp, Pinus radiata
  misc_feature (5)..(5): n is a, c, g, or t
ctggntcctccgatctcgctccctgtaacacgccccggtcagaaatggtgaaggaggaggattgtaaggtgccccaagaggccggaatcgtgaaggaatttcaagcctggactatgcccaagccctgcaacgtgtgcaggatcgcgagcgcttcgctctattgcagggccgacgctgcttatctctgctccggctgcgacgtcaaagttcacggcgccaacaagctggcgtcgcgccacgagagggtgtgg

SEQ ID NO: 1882 - DNA, 351 bp, Pinus radiata; identical to SEQ ID NO: 510

SEQ ID NO: 1883 - DNA, 450 bp, Pinus radiata
tcccttatcacagaatagaaactgatggctagtcagattccagaatgaaccctctaaattaaatgtagcccgcctagaacattagaagaagcaaaagcaaacattcatgatcaataaatgtagattaaaaccaccggcattgatgtgtagtagaagttgaatatggtcaggcatacttgttcctgttgctgtggctggtttcaagttcgtagagctttcctcggccagaaaaaacgatgagcgccacctctgcatcgcacagcactgaaagctcgaaggctttcttcatcagaccgcctcggcgcttccagaaggtcacctgcctgcgcacgctattctcgatcttcttggtttctattttaccgcgccccattttcagcaaaatcccaaaatctgagtatgggcaggcgttgaacttaaatttgctctatgaacagaattaccgagctt

SEQ ID NO: 1884 - DNA, 386 bp, Pinus radiata
aaatgatcagaggcggttctccagttattcacaacaaagaaaaggtcccgcgcttcgggcttctgcccaaatatgcttctgacgagagtgagctgaaatggatcgaggtcccggattgcttctgctttcatctctggaacgcctgggaagaaggagaagacgaggttgtcgtcatcggctcctgtatgaccccgccggacgccattttcaacgaatctgacagcgcgctgcggagtgttctgtcggaaattcggctcaatctcaaaaccggcttgtccaccagacgcgagatcacgccgatgaatctcgagagtacttctagagcggccgcgggcccatcgattttccacccgggtggggtaccaggtaagtgtacccaattcgcc

SEQ ID NO: 1885 - DNA, 190 bp, Pinus radiata
aaatgatcagaggcggttctccagttattcacaacaaagaaaaggtcccgcgcttcgggcttctgcccaaatatgcttctgacgagagtgagctgaaatggatcgaggtcccggattgcttctgctttcatctctggaacgcctgggaagaaggagaagacgaggttgtcgtcatcggctcctgtatgac

SEQ ID NO: 1886 - DNA, 412 bp, Pinus radiata
  misc_feature (17)..(17): n is a, c, g, or t
  misc_feature (68)..(68): n is a, c, g, or t
  misc_feature (86)..(86): n is a, c, g, or t
  misc_feature (92)..(92): n is a, c, g, or t
  misc_feature (401)..(401): n is a, c, g, or t
  misc_feature (403)..(403): n is a, c, g, or t
ggtcccagccgccttcnggggcgttcgtgccgcaagatatgcttctgacgagagtgagctgaaatggntcgaggtcccggattgcntctgcnttcatctctggaacgcctgggaagaaggagaagacgaggttgtcgtcatcggctcctgtatgaccccgccggacgccattttcaacgaatctgacagcgcgctgcggagtgttctgtcggaaattcggctcaatctcaaaaccggcttgtccaccagacgcgagatcacgccgatgaatctcgagagtacttctagagcggccgcgggcccatcgattttccacccgggtggggtaccaggtaagtgtacccaattcgccctatacgtgagtcgtattacaattcacctggccgtcgttttacaaccgncntgactggga

SEQ ID NO: 1887 - DNA, 329 bp, Pinus radiata
atcagaaggcggttctccagttattcacaacaaagaaaaggtcccgcgcttcgggcttctgcccaaatatgcttctgacgagagtgagctgaaatggatcgaggtcccggattgcttctgctttcatctctggaacgcctgggaagaaggagaagacgaggttgtcgtcatcggctcctgtatgaccccgccggacgccattttcaacgaatctgacagcgcgctgcggagtgttctgtcggaaattcggctcaatctcaaaaccggcttgtccaccagacgcgagatcacgccgatgaatctcgagagtacttctagaagcggccggc

SEQ ID NO: 1888 - DNA, 101 bp, Pinus radiata
aaatgatcagaggcggttctccagttattcacaacaaagaaaaggtcccgcgcttcgggcttctgcccaaatatgcttctgacgagagtgagctgaaatgg

SEQ ID NO: 1889 - DNA, 326 bp, Pinus radiata
  misc_feature (79)..(79): n is a, c, g, or t
atgatcagaggcggttctccagttattcacaacaaagaaaaggtcccgcgcttcgggcttctgcccaaatatgcttctnacgagagtgagctgaaatggatcgaggtcccggattgcttctgctttcatctctggaacgcctgggaagaaggagaagacgaggttgtcgtcatcggctcctgtatgaccccgctggacgccattttcaacgaatctgacagcgcgctgcggagtgttctgtcggaaattcggctcaatctcaaaaccggcttgtccaccagacgcgagatcacgccgatgaatctcgagagtacttctagagcggt

SEQ ID NO: 1890 - DNA, 246 bp, Pinus radiata
agctgaaatggatcgacgtcccggattgcttctgctttcatctctggaacgcctgggaagaaggagaagacgaggttgtcgtcatcggctcctgtatgaccccgccggacgccattttcaacgaatctgacagcgcgctgcggagtgttctgtcggaaattcggctcaatctcaaaaccggcttgtccaccagacgcgagatcacgccgatgaatctcgagagtacttctagagcggccgcggggc

SEQ ID NO: 1891 - DNA, 238 bp, Pinus radiata
aaatgatcagaggcggttctccagttattcacaacaaagaaaaggtcccgcgcttcgggcttctgcccaaatatgcttctgacgagagtgagctgaaatggatcgaggtcccggattgcttctgctttcatctctggaacgcctgggaagaaggagaagacgaggttgtcgtcatcggctcctgtatgaccccgccggacgccattttcaacgaatctgacagcgcgctgcggagtgt

SEQ ID NO: 1892 - DNA, 349 bp, Pinus radiata; identical to SEQ ID NO: 586

SEQ ID NO: 1893 - DNA, 417 bp, Pinus radiata
gaagaagaagaagaagaaagccccgtggtttcagggcgaatgagccgtagcgcctcagaatgggccttccagaagtttctcagttttgatggttccaagattccgtcagaagatggagaaggcgaacagaagcctctcggtgttaaagatcctctgcttcacggtcatatggacaacgtccctgcggcgctcagtcctctctttgccgaagtcaaggatgaggttcttcttcctactgaccctcgagattacgaggccttcctcaagcggaggcttaaccttgcctgcgcggcagtcgccttcactcgggttacaggaattagctctccaggccctggtccctcaacagtggatgcaaaccaatctcagaacactttaggatcagaaagagtgcatcgttggtatcccaatcttccg

SEQ ID NO: 1894 - DNA, 456 bp, Pinus radiata
ggaaggcaatgagagtgatctcctcaagggaatgaagaaggcaaggcgtgagagaggatcaacagcaaaggaacggattagtaaaatgcctccctgtgctgctggaaaacggagttctatctacagaggcgtcacaaggcatagatggacaggacgatatgaagctcatctttgggacaaaagtacttggaaccagaaccaaaataaaaagggcaagcaagtgtacctaggtgcctatgatgaggaggaggctgcagccagagcttatgaccttgccgctctgaaatattggggtcctggaactctcattaattttcctgttagtgactatgctagagatattgaagagatgcagagcatttcaagggaagatttcctggcttctctcagacggaaaagtagtgggttttcaaggggaatgtcaaaataccgtggactgccaagcaatcacaaact

SEQ ID NO: 1895 - DNA, 456 bp, Eucalyptus grandis; identical to SEQ ID NO: 1894

SEQ ID NO: 1896 - DNA, 388 bp, Eucalyptus grandis
gtaaatcaatacctggtcagcatcctaatttagcattcaatgttggcagtattagatccaaccagcagcagcttcagcaacagcatgatctgcccctcctccccaagccagcaacaatgccttttgcctcttcagtaagtatagcaaataattcccagatgcctggtttagggtcaagaggggtaatcaggatgacagatgcatccatcaaaagttccttagctcaaggtggtgggctgcagactggagttggcatgactgggttagacactaggggagttgctcttcagacagtatctcctgctaaccatatatctccggatgtaatctctaggaacacgatggattcgtcttcactctcaccagttccttatccgtttggccgggg

SEQ ID NO: 1897 - DNA, 202 bp, Eucalyptus grandis; identical to SEQ ID NO: 1251

SEQ ID NO: 1898 - DNA, 289 bp, Eucalyptus grandis
gttgaatggggattcaaacaatggcttcacaaggcggcggcggcagcagcggtaatgccagaggtggcggtggcaataatggaaaatccactgaagttcagccattgactcggcagaattcaatatacagtctcactcttgatgaggttcaaaaccagttaggtgatttagggaagccattgagcagcatgaacctggacgagcttttgaagaatgtctggacagctgaggccggtcagtcaatgtttatggatgttgagggcacggctgtggctaatcaaaatgctct

SEQ ID NO: 1899 - DNA, 477 bp, Eucalyptus grandis
cttgaaatcgggcgtgcccagctcgatcgcagcttcaagcagctcaaaaagactgtatatcactcgacgagtgtgctgagcacattgagctcgagctggtcatcaaagccgccattggcagtgaagtaccagctcaaccccggctcactcactgaatcagatgattcaaagagcctctgctccactctggacaagctcttggcttgggagaagaagctctatgaggaagtgaaggctagagaaggtgagaagatagagcatgaaaagaagttgtcagtacttcagagccaggaaggcaagggagaagatgaaaccaaggtagacaagaccaaggcctcattaaataagttgcaagcactaatagctgttacgtcggaggctgtctctacaacttcaaatgcaattattggcctcagagacagtagacttgtcccgcagcttgttgaactctgccatgggttcatgtacatgtggagg

SEQ ID NO: 1900 - DNA, 1243 bp, Eucalyptus grandis
cccccctcttcctcagtcagccagtctctctctctctctctctcacatctctagtttcagcctttttcctccatttggccaagcagcgcccgccgcgcgacccgaaggcttccggatctggtgctcgttgctattccgtccgtcgataggaggctaggctacgctgaaagaagttgatgagcgcaatttcactgatggagtggaatgcgaaacctcctctgcagtgggaatgggagaatcttatgatgttcggttcaaaagcgactgaaacctctaagccgctgcgagcgactgattggggaatcgaggcggaggagctgattgaccccgggtccttatttctgtatgagaatggtggcggcagcagcagttgtaccagcattgatccgggttacacttctgtgtccaagagctcgaaatcggcttctgtcaattcttcgtctacggacgaattgaaaatctcgaaattctctgtggaggcgcatgaaggcttttctctgcagagtagcaagaaagaattggcggtgaatgattttaccggaatgtcaccggcactcgagccttcggtctgctctggtgagccactgctcagtctaaagctcggtaaaaggatatattttgaaaatactattgacaaggatcatgtgaagacccaagaccttccttcggtcatgaaatcacctgatactccagcaaagagaaacaaatccaactgtcagggtacgtccgccccacgctgccaagttgaaggctgtaaccttgacctctcttcagctaaagattaccaccgcaagcatagagtttgtgagagtcactctaaatgccctaaggtcatcgtcagtggtatagagcgtcggttttgtcagcaatgcagcaggtttcatgggctatctgagtttgatgaaaagaagcgtagctgtcgcaagcgcctatctgatcacaatgcaagacgtcgcaagcccccgccagatgtgacccagttgaatccggctagactgtctgcactgttttatggtgggatgcagcagttgaatccagtcttgagcagagctccagctatccacaccaggtctactgctagttttaaatgggcagatacacaggacactaagctcatagagaaaggtccgaagcttccaataggcggaggtgttggtgagtgtatcactatcccaagcaatgggataccggacaccctcaagtccactggattgggcaaaagctataacgaacttctatcatc

SEQ ID NO: 1901 - DNA, 366 bp, Eucalyptus grandis
aaaaagtatatatacctcggcctatttgatagtgaagtagaggcagcaagggcgtatgacaaggcagctatcaaatgtaatggaagagaggctgtgaccaactttgaacctagtacgtacgatggagagatgattgcaaaagccagcaatgaaaatagcatctatggtgaccatggtcttgatctcaatctcgggatatcagcttcttccaggggaatggtggaaaccttagagccctcggacgacatgcgtcagggaagtagtttaagggtaggaaactctgctgcatcctggggtgatccatctgttgaaggtttatcgatgacatctggacaacctctccttgacgggtgtttatcctaccgt

SEQ ID NO: 1902 - DNA, 466 bp, Pinus radiata
ttaattcatggcggcggcggcgacgactacgttgggttgtgcgaaggtggatttgatacggctcatgcggctgcgagagcttacgacagggcagctatcaagtttcgaggagttgaagctgatataaattttactctcaccgactatcaagaagatttagaccagacgagcaagctctctaaagaagagtttgtgcatattctccgtcgtcaaagtactggtttctctcgtggaagttccaagtatagaggcgttaccctgcacaagtgtgggcgatgggaagccagaatgggtcaattcctaggaaaaaagtatatatatttgggattatttgacagtgaagaggaggctgcaagggcatatgataaggctgctatcaggtgcaatggaaaggaggcagtaacgaactttgatcctagcttatatgaaaaagaaattcttgaagaaagaagagagagtcagactt

SEQ ID NO: 1903 - DNA, 240 bp, Pinus radiata
gcttattggaatgcctgacactaactatggaagcgaacagacaaatgcttgcaaaaaacagaaaagaatacgttccaaggattcaggagaagatggtgaagatagacagagagaacatcctttcattgttactgagcccggtgaacttgcaagagggaaaaagaatgggttagactatctctttgatctttatgaacagtgcgggaaatttctgctggatgtgcaacatattgcgaagga

SEQ ID NO: 1904 - DNA, 495 bp, Pinus radiata
gccatggcaatagattttgcaggacgggaatctcctcgtgtgcaggctcgcagataccccattgccaggccgagggttgtaaggcaaacttgagcagtgccaaacactaccatcgccggcataaggtttgtgaattgcactcgaaggcttctactgttattgtgggtggtttcattcagcggttctgccaacaatgtagcagatttcatccaagatctgaattcgacgagggaaaacgaagctgcagaaagcgccttgctgaccacaacagacgaaggagaaaacctcagccaagtacatgtgttacatcacaatctcaggctgggacaacaggtttagaaaatgataaccagacaactaaaggatcatcaggtcacattacaacggctgttcagaatacaccgaacattagcagaagcactagtagtactagtccgtccttgattacatcagtaccgatgatgatgttcccaaataactataaaggacatagtc

SEQ ID NO: 1905 - DNA, 377 bp, Eucalyptus grandis
taacactacattcatcaccccaaacagcaaacggatcatctcgcacaatccatcaagtgtagatcgaccggcggaatctgcagcactggcaaagaggatgaggagggctcacattcagaatatagcgggagattgcaacttgaaagacagattacatatacaaagtggaatcacatatagtcagcaacaaagagctcccttttccacattggcgcagaacttccgcactagcaattcgcccccccagcaatctgaaagcaaccaaaaagaagccaccgatgatgctcatggcaccaacgtccaaggaacatttcttaaaaaggatgatccaaaagttactgctctgattcaacaagccgagctgctcagttcccttg

SEQ ID NO: 1906 - DNA, 377 bp, Eucalyptus grandis
gtgattttagtgctcgatactttgaaaagggcatcaatacagtcaaacgagataaaaagacataacatgcaaaactcaatacatgattctcagaaaagaccatcatctttaattcagtcaaacgaggctgtttttacgcaaacttcggtcataagctgtgccttgcaatcgtttgttaaacctccaaatgctaaggtcacggtcacattcctctctgatctttgagcagctcatggcaccaacgtccaaggaacatttcttaaaaaggatgatccaaaagttactgctctgattcaacaagccgagctgctcagttcccttgcggtgaaagtcaatgcagataacatggaccagagtcttgaaaatgcttggaaggg

SEQ ID NO: 1907 - DNA, 1668 bp, Pinus radiata
agctgtaagctacctacgaagtggaatcgaagagagagagagtgagaggctaactaataagatgaatatgaagattcgaacctccgacaccagtactcctgatgatcagcaacagcatagcggcgccgtgaaagtggcgattccggccgtgtcgggggattcggggacgattgggttaaagctgggcaagcggacctattttgaggcggtgaaggcaattccgacagcgatcccctcgccgtcttgcgttccggctgccaagaagcagcagtctgcgttgcagggaacgcatatggtgccgcggtgtcaggtggagggatgcgagatggaactcaccgccgcaaaggactaccaccgccgccacaaggtctgcgagctccactccaagtttcccaaggtcatcgtcaacgggatcgagcagcgcttctgtcagcaatgtagcaggtttcatacgttgtctgagtttgatgaagggaagcggagctgtcggaggcgtctagctggccacaaccagcggcgtaggaaaccccaacttaattcaacggcgatgaaagctgcaagatttgcttccactttctatgatgacgggcgacttagcagcatcctgatggctagatcacctttcatgcatccacggatagcttcaaacttggaggagaattcgctcgatttcaaacttggaggatatggaaaaggagcttggccgaggattaaggctgaggatgtatcatcatatgatgggcaattatcaaccaaataccctctcccgtcataatgctgaaagattgcttttccttttacagggttctaagactgtacctggtggagctattaatcaaagcactcatcagtacaggcaaagctccagggatcatgtgggccaatccttgaccttgtcatcctgctcgggagaaaatctaacaggtttaaatgttatatctgccccacatggtttatcaggagtctcggactctggctgtgcgcactagcttctgtcaattcaatccgggggcccaaggtcctcaggatcagcttcatttgatatgaccacgcggtcaggtctcacaatggatcaacttatactagaggatcaacctcttatggctcaagcaccattgatgcaaggagtacaacacaactttggtcattttgcagaagacaagttactaacaatgtatccccagtcctctactaatcttgcaacaggtgggttccctgcagctactgtgaattctatggataagcagcaccaaggtcatccactcgtttccgatgcaggccaaatggtaaactttggaggaaatatatttggcttgctgcaggggagcagtttcagaggctctcaagctgcaagttcacaagatattcaaggcaccatagatctgatgtgcacgtcctcggaaacacaaactaatgattctcatgatcaacttggcatggtgcaccagggaagtaaacagtttactgacttgcagttgttgaggtcttttgaatcatctatttatgacactcatcaactgctgtagctctaatctggttgttcttccggcatgttttctttgccctcagacttgaagataactgttaaaacttcattatgacaattatctgtaccctctaaatgcagacaattgctttcaattacccttgcttatttcaaaaaaaaaa

SEQ ID NO: 1908 - DNA, 821 bp, Eucalyptus grandis
ctctctctctctctctctctctctttctttctttctttctctctctagcagaggcacagaggcgcgcagagggcactgatgatgacgactggggtagctccaatgaatgggctctagagaacctcgctcatggacgtgggttcgggctcgtggacgacggagtccgggtcctcttctcctccccctctcgagtccctcaacggcctcaagttcggccagaaaatctacttccagaataataacagtagtaataatgccgccgcacccaagaacggctccggctccggctccggctcctcctccgccgccgcgcccgcgcccgggtcgggcacgcccccgaagaaggtgagggcctccgccggcggcggcggctgcggggcgatccagggcgggcagcccccgaggtgccaggtggaaggctgccgggtggatctgagcgatgccaaggcttactattccaggcacaaggtgtgcggcatgcactccaagtccgccaccgtcatcgtcgccggcatcgagcagaggttctgccagcagtgcagcagattccatcagcttactgaatttgaccaagggaaacgaagctgtcgtagacgtttggctggtcacaatgagcgccggaggaagcccccacctgggtcgctactatcctctcgctatgggcgactgcaatcctctatatttgagaacaccaccagagtgggtagttttctgatggatttcacagcatacccgaagcatgcatggtcagcgccacgtttttctgagcgcacgacacctggagatctagtccccggaccaggaaaggtctatcctcatcc

SEQ ID NO: 1909 - DNA, 105 bp, Eucalyptus grandis
gggaagaggagcgtagagtgggattcgaacgattggaagtgggacggtgatctgttcgtcgctaggccgctgaacccggtcccgtccgatttccccggccggcag

SEQ ID NO: 1910 - DNA, 338 bp, Pinus radiata
cagaagagacctgccatggaaacacattttgcaggacagaaatttcatcattcacaggctcacagataccccagtgccagtccgagggttgtaaagcaaacttgagcagtgccaaacactaccatcgccgacataaagtttgcgaattccactctaaggctcctacggtcgttgttggcggtcagattcagcggttttgccaacagtgtagtagatttcatcagacatctgaatttgacggaggaaagcggagctgcagaaagcgccttgctgaccacaacagacgccggcggaaacctaaaccgagtcaatgtactacatcccaatgtcaggcaggg

SEQ ID NO: 1911 - DNA, 465 bp, Pinus radiata
tcgacatggtcctttgcattttcttgaagaagctgtgattgttcgaccgacacgttactcattcacattgcctctccatctccttcaatcaggattccagaattgcccgtcgaaatggatgaagtccaagtcaaggtcgacattcagagcacaaatgtcagtgccgacgagcccaggcctgcgaagcgccagggtttcgagctcgccaagagccctgaaaacgtggcttcgaaatccactgcgctctcctctccgaaaaaacccaaagctgcttcttcctcttcttcttcgtcgccgagagcgcagcctcccgcttgccaggtggagaaatgcgcggcggatcttgctgatgccaaagagtactataggaggcacagggtttgcgagcaacattcaaaggctcgaattgtgctcgttcttggcctccagcaacgcttctgccagcaatgtagcagattccatgtg

SEQ ID NO: 1912 - DNA, 509 bp, Pinus radiata
ctccttacaaaagtagctcccctcttgactccaggcggtcttcccagtccataacgatacggattacacccacgcaccccatgtcttccacctcatcgtattcttctccctcccctgacacaccatcacagtctgccgctgtgcgcccgacatctacccgagacgattcttccgtcatggaacctccacgtaagcgagccagggctgatcttaacgctgaacagcgaagagaggccagggcccaccgtaatcgaattgccgctcaaaactctcgcgataaacgcaaggcgcaattcacttacatggagcagcgcgtggcacaactggaggaagagaaccaacgactacgagcaggcatgggcctctctcaattcacgccagccgacaacgacaagttcgtcagcctcgagagagaatcagtacaggcccgcgagaacagagagctcaaggagaggatcaagagtctagagagcgggtggtcggccgtcatcaaagcgttgcaggcctca

SEQ ID NO: 1913 - protein, 151 aa, Pinus radiata
EGNESDLLKGMKKARRERGSTAKERISKMPPCAAGKRSSIYRGVTRHRWTGRYEAHLWDKSTWNQNQNKKGKQVYLGAYDEEEAAARAYDLAALKYWGPGTLINFPVSDYARDIEEMQSISREDFLASLRRKSSGFSRGMSKYRGLPSNHK

SEQ ID NO: 1914 - protein, 128 aa, Eucalyptus grandis
KSIPGQHPNLAFNVGSIRSNQQQLQQQHDLPLLPKPATMPFASSVSIANNSQMPGLGSRGVIRMTDASIKSSLAQGGGLQTGVGMTGLDTRGVALQTVSPANHISPDVISRNTMDSSSLSPVPYPFGR

SEQ ID NO: 1915 - protein, 66 aa, Eucalyptus grandis
AKHAQTPPTSWEGGSGADSEVNMLKDYASEDWITGVDRFRLSLVEFLDKLNKYAESSVHMYVSLEK

SEQ ID NO: 1916 - protein, 89 aa, Eucalyptus grandis
MASQGGGGSSGNARGGGGNNGKSTEVQPLTRQNSIYSLTLDEVQNQLGDLGKPLSSMNLDELLKNVWTAEAGQSMFMDVEGTAVANQNA

SEQ ID NO: 1917 - protein, 159 aa, Eucalyptus grandis
LEIGRAQLDRSFKQLKKTVYHSTSVLSTLSSSWSSKPPLAVKYQLNPGSLTESDDSKSLCSTLDKLLAWEKKLYEEVKAREGEKIEHEKKLSVLQSQEGKGEDETKVDKTKASLNKLQALIAVTSEAVSTTSNAIIGLRDSRLVPQLVELCHGFMYMWR

SEQ ID NO: 1918 - protein, 349 aa, Eucalyptus grandis
MEWNAKPPLQWEWENLMMFGSKATETSKPLRATDWGIEAEELIDPGSLFLYENGGGSSSCTSIDPGYTSVSKSSKSASVNSSSTDELKISKFSVEAHEGFSLQSSKKELAVNDFTGMSPALEPSVCSGEPLLSLKLGKRIYFENTIDKDHVKTQDLPSVMKSPDTPAKRNKSNCQGTSAPRCQVEGCNLDLSSAKDYHRKHRVCESHSKCPKVIVSGIERRFCQQCSRFHGLSEFDEKKRSCRKRLSDHNARRRKPPPDVTQLNPARLSALFYGGMQQLNPVLSRAPAIHTRSTASFKWADTQDTKLIEKGPKLPIGGGVGECITIPSNGIPDTLKSTGLGKSYNELLS

SEQ ID NO: 1919 - protein, 122 aa, Eucalyptus grandis
KKYIYLGLFDSEVEAARAYDKAAIKCNGREAVTNFEPSTYDGEMIAKASNENSIYGDHGLDLNLGISASSRGMVETLEPSDDMRQGSSLRVGNSAASWGDPSVEGLSMTSGQPLLDGCLSYR

SEQ ID NO: 1920 - protein, 155 aa, Pinus radiata
LIHGGGGDDYVGLCEGGFDTAHAAARAYDRAAIKFRGVEADINFTLTDYQEDLDQTSKLSKEEFVHILRRQSTGFSRGSSKYRGVTLHKCGRWEARMGQFLGKKYIYLGLFDSEEEAARAYDKAAIRCNGKEAVTNFDPSLYEKEILEERRESQT

SEQ ID NO: 1921 - protein, 79 aa, Pinus radiata
LIGMPDTNYGSEQTNACKKQKRIRSKDSGEDGEDRQREHPFIVTEPGELARGKKNGLDYLFDLYEQCGKFLLDVQHIAK

SEQ ID NO: 1922 - protein, 164 aa, Pinus radiata
HGNRFCRTGISSCAGSQIPHCQAEGCKANLSSAKHYHRRHKVCELHSKASTVIVGGFIQRFCQQCSRFHPRSEFDEGKRSCRKRLADHNRRRRKPQPSTCVTSQSQAGTTGLENDNQTTKGSSGHITTAVQNTPNISRSTSSTSPSLITSVPMMMFPNNYKGHS

SEQ ID NO: 1923 - protein, 125 aa, Eucalyptus grandis
NTTFITPNSKRIISHNPSSVDRPAESAALAKRMRRAHIQNIAGDCNLKDRLHIQSGITYSQQQRAPFSTLAQNFRTSNSPPQQSESNQKEATDDAHGTNVQGTFLKKDDPKVTALIQQAELLSSL

SEQ ID NO: 1924 - protein, 50 aa, Eucalyptus grandis
AAHGTNVQGTFLKKDDPKVTALIQQAELLSSLAVKVNADNMDQSLENAWK

SEQ ID NO: 1925 - protein, 257 aa, Pinus radiata
AVSYLRSGIEERESERLTNKMNMKIRTSDTSTPDDQQQHSGAVKVAIPAVSGDSGTIGLKLGKRTYFEAVKAIPTAIPSPSCVPAAKKQQSALQGTHMVPRCQVEGCEMELTAAKDYHRRHKVCELHSKFPKVIVNGIEQRFCQQCSRFHTLSEFDEGKRSCRRRLAGHNQRRRKPQLNSTAMKAARFASTFYDDGRLSSILMARSPFMHPRIASNLEENSLDFKLGGYGKGAWPRIKAEDVSSYDGQLSTKYPLPS

SEQ ID NO: 1926 - protein, 230 aa, Eucalyptus grandis
MDVGSGSWTTESGSSSPPPLESLNGLKFGQKIYFQNNNSSNNAAAPKNGSGSGSGSSSAAAPAPGSGTPPKKVRASAGGGGCGAIQGGQPPRCQVEGCRVDLSDAKAYYSRHKVCGMHSKSATVIVAGIEQRFCQQCSRFHQLTEFDQGKRSCRRRLAGHNERRRKPPPGSLLSSRYGRLQSSIFENTTRVGSFLMDFTAYPKHAWSAPRFSERTTPGDLVPGPGKVYPH

SEQ ID NO: 1927 - protein, 35 aa, Eucalyptus grandis
GKRSVEWDSNDWKWDGDLFVARPLNPVPSDFPGRQ

SEQ ID NO: 1928 - protein, 112 aa, Pinus radiata
EETCHGNTFCRTEISSFTGSQIPQCQSEGCKANLSSAKHYHRRHKVCEFHSKAPTVVVGGQIQRFCQQCSRFHQTSEFDGGKRSCRKRLADHNRRRRKPKPSQCTTSQCQAG

SEQ ID NO: 1929 - protein, 117 aa, Pinus radiata
MDEVQVKVDIQSTNVSADEPRPAKRQGFELAKSPENVASKSTALSSPKKPKAASSSSSSSPRAQPPACQVEKCAADLADAKEYYRRHRVCEQHSKARIVLVLGLQQRFCQQCSRFHV

SEQ ID NO: 1930 - protein, 143 aa, Pinus radiata
MSSTSSYSSPSPDTPSQSAAVRPTSTRDDSSVMEPPRKRARADLNAEQRREARAHRNRIAAQNSRDKRKAQFTYMEQRVAQLEEENQRLRAGMGLSQFTPADNDKFVSLERESVQARENRELKERIKSLESGWSAVIKALQAS

SEQ ID NO: 1931 - DNA, 199 bp, Pinus radiata
aacaactgaacaataaaaatcacaagcactgaatctaaccatctctccacaaagcagaatcattttttagcagtgcagaattaaatcaaaacacaattgttcggctgtaaagcaaagatgaagcatcacgtagtgcacaattgctgtagcaagaaagctgtaaagagaggcttctggtcgcccgaggaagatttgaagc

SEQ ID NO: 1932 - DNA, 380 bp, Eucalyptus grandis
gggatctctaggaacttcgtgaaaacgcggacgccgacacaggtggcgagccacgcccagaagtacttcctccggcggaccaaccagaaccggcgacgccggcggtccagcctcttcgacataaccaccgactcgtactttggggtttcaagctctacaatggaggagggtcatcatcaagcgcaccaagtacccagcttccctctttccttgcctccggcggtttcaccgggaaccggcgagaaactgctggaaagtctgcgactaagaaaagagggctgccagtcgaaacccaccccgtcgaagcccatccgcccggtcccgatccttcccatccctccgtcctcgaaaatggcggctctcgacctcaacaaggcgac

SEQ ID NO: 1933 - DNA, 630 bp, Eucalyptus grandis
ggaccggcgagtttctccggggaagaccggcggagcggcggcggcggcggcggcggcggggggaaaagctcccgcctttcgtcgtttcgcggtccgtggaataggcgacaagtcggattgcgttgcgtgtcgcgcctcgcttcgtatataagggcggcttgctgctgctgctactggtctgaggagtcaaccgagctcgagcgttacgcgcttcccgaaggttccgccggctagggtttttttatatttccctctgtttttcctccgttcggccacggtcgttgcttcgctttaaaaggattggcgcgattgagctgggcggagcttgagggttcgggcggtggcggcggaagtggagtggagcggggggtggtggtgctcgacatggtaatcgggttctgacgatgccgagctttgttccagcgacaccggcctccaattccattggttcggagggaaacgttgtccagtctaatcaaaatacagattttgggtcgtttgagcattcacttggattccgcatagaggatgccatcaaccttagcagaacagatcctgtctttaatcagataaaaccaaacggtcgagctcttggaactgacattcaagctcgtgcttttaataagtctg

SEQ ID NO: 1934 - DNA, 524 bp, Eucalyptus grandis
ctttactattctaagtcctctacttctggtttggaatcactaatttcttggtctcactttcgcttggcctatcacccgagagttctctgcagaaacttcacagccgtcctctgctctttcaccaaccattgtatgcctggttttactagggctaggaagatgagcatgtccggagaagaagagggtgacctgcgaagggggccatggactcgcgaggaagacaatttgctcattcactcgatcacatgccacggcgagggacgctggaatatgttggcgaagagcgcaggattgaagagaactggcaaaagctgcagattaaggtggctgaattacctgagacccgacatcaagcgcgggaatctcaccccgcaagaacagctcatgatccttgaacttcaccacaaatggggcaacaggtggtcgaaaatcgcgcagtatctcccaggaaggacagataacgagatcaagaactactggaggacgcgggtgcagaagcaagcgcgccagctcaacatcgaatc

SEQ ID NO: 1935 - DNA, 440 bp, Eucalyptus grandis
gtgctgtgacaaggtgggattgaagaaagggccgtggacacctgaagaagaccagaagctcctcgcttacatcgaagagaacggccatggaagctggcgtgctttgccttccaaagctggtcttcagagatgcgggaaaagctgtaggctaagatggactaattatcttagacctgacatcaagagagggaagttcagcttacaagaggaacagaccataattcaactccatgcccttcttggcaataggtggtcggccatagcaactcatttaccgaagcgaacagacaacgagatcaagaactactggaatacgcatctgaagaagagattggcgaaaatgggaattgacccggtgacccataagcctaaaaatgacgccctagtctctagtgacggtcaatccaagagcgcggctaagctcagtcacctggctcagt

SEQ ID NO: 1936 - DNA, 299 bp, Eucalyptus grandis
cggacccttccgaaaaatgcagggctcaggagatgcggaaagagctgtcgcctgcggtggacgaactacctgcggcccgatatcaagagagggaggttcacgttcgaggaagaggagaccatcatccagttgcatggtgttttggggaacaagtggtcggctatcgcggctcaattgcccgggaggaccgacaacgagatcaagaactactggaacacccacatcaagaaaaggctacttaaaatggggatcgacccggtgacacactccccacgcctcgatcttctagatctgtcctc

SEQ ID NO: 1937 - DNA, 377 bp, Eucalyptus grandis
ggcccctctctctttctctctctctgtgtctgtctttcttgtggatccaccaggctcgtctttaagaatatacagcagcgagcaggcaagacaacgccccatctctcttctctctctctctctctctgtggctctgtctttcttttgtttcttgccgttttggggtgtgtgtgttgggttgtgtgaattggagcgaggatggggagggggagactgcagctgaagaggatagagaacaagatcaaccggcaagtcaccttctccaagaggagggcgggtctgctcaagaaggcccacgagatctccgtactctgcgacgccgaggtcgccctcatcatcttctccgccaagggcaagctcttcgagtactccaccga

SEQ ID NO: 1938 - DNA, 278 bp, Eucalyptus grandis
tgttagcaagcatgtatgtactaactagtagtttttgtaaagcatgatgtcgaaaccttgagtagcaaggtgaagatggctgaagagacggttaaaagagtaaccggactgaacccaatgctgcatgtgatgtccgacatgtcttctgtgggtgtgccaccatttgatggtagtccttctgatacatcagcggatgctgcagttcctgtgcgagatgacccaaagcaccaattctatcaaaccaattctagtaaccccgcatcatctgctgacgatat

SEQ ID NO: 1939 - DNA, 342 bp, Eucalyptus grandis
acaggttgctcaattaagagttgagaattctactttactgaaacgtctctcggacataagccagaagtacaatgtagcagctgttgacaacagagttttggaagctgatgtcgaaaccttgagagcagaggtgaagatggctgaagagacggttaaaagagtaaccggactgaacccaatgctgcatgtgatgtccgacatgtcttctgtgggtgtgccaccatttgatggtagtccttctgatacatcagcggatgctgcagttcctgtgcgagatgacccaaagcaccaattctatcaaaccaattctatgtaaccccgcatcatctgctgacgatatga

SEQ ID NO: 1940 - DNA, 376 bp, Eucalyptus grandis
gctgttttcacatctttttgaacacgcccctaaagatccgccctcagagccgcctctgtccggtggctgctgacattccacctagaaattcccgaccaagttccccctttctaagccagattgggaaaggttcatatttgtccaacagtagtagtggatttaaatggggaggcactcttgctgctacaagcagaagctgaggaaaggcctctggtcacctgaagaagacgagaagctcctcaggtacatcacgcagtatggccatggttgctggagctctgttcctaagcttgcaggtctgcagaggtgtgggaagagctgcagattgaggtggattaactacctgaggcctgatttgaagaggggcacattctct

SEQ ID NO: 1941 - DNA, 169 bp, Eucalyptus grandis
aggaattgcagcacctggaacagcaattgagtggggccttatcatctgtcaaggagaagaaggagcaatggcttctggagcagctggagcgttcaagattacaggagcagagggctatgctggagaatgaaactctgcgcagacaggtcgacgagcttagaggtttcct

SEQ ID NO: 1942 - DNA, 188 bp, Eucalyptus grandis; identical to SEQ ID NO: 27

SEQ ID NO: 1943 - DNA, 321 bp, Eucalyptus grandis
ctctttcctcctcaatcggaagggttcttcaacccaatggacggcaacctctcattgcaaatcggatacaatccgacatgtctggacgagatgaatgcttcggtttcgagccaaaatgttgctggattcattccgggatggatgctttgaacttactacatcgacttggagtgtgaatcgagctggtgaaatttgtgcgtgtgtcccttgtaaaattgcgatccgcaagacaataagtacataatattttggagctgtgatgacataaaaagaggaaggccaccctttcctctctcatgatcagaacttttgataatgtct

SEQ ID NO: 1944 - DNA, 905 bp, Eucalyptus grandis
ctagtggatcccaagtctccatcatcatgatctccagcaccggcaagctccacgagtacatcagcccctccacctcaacgaagaagatgtacgatcagtatcagcaggcgctcgaggttgatctctggagctctcactatgagaagatgcaagagaacctgaggaagctgaaggaggtgaacaagaagcttcagctggaggtcaggaggaggttcggggaaggactgaatggtatgagcttatcggaattgtgcggtcttgagcaagatatggacaacgccgttagcctgatccgtgaacggaagtacaagacgctcggcaatcaaatcgacaccgccaggaagaagaaaaagaatgctgaggaaataaacaaaagtctcctgcaagactggaccaatctgatcaagcatctgagggaggacgacccgcacttcggaatggtcgacaacggcagggattacgaggctgtgatcgggtatacagacgccgccgccgccgctcgcttgtacaccctgcgcctgcaaccggaccagcccaatcttactagcggaggaggatcggagatcacgacctaccctttgctcgagtgagacgaaggcgtcggaaacccttccgacgtcctcatattgtctattcattctgtctaagggccgattccatctggaatcctgacttcattggtatgtcgaagtttaggactttgttatgtcatcctattcagcagctaagtttgttcttatcagaagctgttcctattatggaccgagggcgatttcctctagggcatcatgtgttttaagacaagtctatatataagactactttaaaacaatcgaatgagttggtgcaaaaaaaaaaaaaaaaaaaaaaacaaaaaaaaaaaaaaaaaaaaaaaaaacttcaag

SEQ ID NO: 1945 - DNA, 337 bp, Eucalyptus grandis
gcggcaaggagcaactaaatgtaacactctgattactagggacctctcattgtctttggatggcatttaaatcaccaggaggaatcacgtggctgaaacatttacttgtgaagaacttttacttaggggagcatctaaaatgcaggaatgggctcatcaagaaggcctacgagctctccgtcctctgcgacatcgacatcgccctcatcatgttctccccctccgaccgcgtgagccacttttcgggaaaaagaaggatcgaggatgtcttgacccgtttcattaacctcaccgaccaagaacggacactcctagatgtccaggatcggcgcacacg

SEQ ID NO: 1946 - DNA, 301 bp, Eucalyptus grandis; identical to SEQ ID NO: 26

SEQ ID NO: 1947 - DNA, 354 bp, Eucalyptus grandis; identical to SEQ ID NO: 64

SEQ ID NO: 1948 - DNA, 456 bp, Eucalyptus grandis
gtttcctcttcaggagaaagcaaggagctgtagaggaattgaaaatggtgcaagaagtccgaaagggtccatggacagaacaagaagatttccaactggtgtgctttgttggactttttggagatcgccgatgggattttatagcgaaggtatcaggtttgaaggtggcgggagaaaataataggtatgttcgttttaaagcctgggggttttttggaaggagctacttctaaccgcccagctttattccaggattgaatagaacaggaaaaagctgcagactacgctgggttaactacctgcatcctggcctaaaacgagggaagatgacacctcaagaagagagactggtgctcgaacttcattccaaatggggaaatagatggtcaagaattgctcgcaagctaccagggcgaacggacaatgagataaagaactattggaggactcatatga

SEQ ID NO: 1949 - DNA, 382 bp, Eucalyptus grandis
atttttcaactccccccccccaccccgaatcaaatcccattccctctctccctccctccctttttttcccccaatcttttgttgcgttttcaagcacccacgccccccaatctccaacgccatcaatcaagctcaagcaccatcacctcaagaagaaagaaggaaagaaagagagaaggaccggagacccgacagagggtcgcgcgcgcacgagacatgggacgatccccttgctgcgagaaggcgcacaccaacaagggcgcgtggaccaaggaagaggaccagcgcctcatcgactacatccgcctccacggcgaaggttgctggcgctccctccccaaatctgccgggcttctcaggtgcggcaagagctgcaggctca

SEQ ID NO: 1950 - DNA, 371 bp, Eucalyptus grandis; identical to SEQ ID NO: 66

SEQ ID NO: 1951 - DNA, 356 bp, Eucalyptus grandis
aaaaagcataagctccctgacccataatccctagtatcgatggccaggtttcccagggttgacaagagcaacagcaagaagacagtgaagaagggcgcttggagtgcggaagaagaccagaaactggtggcttatatcaagagatatggcatttggaactggactcacatggccgaacccgccggtttagcgagaacaggaaagagttgccggcttcgatggatgaactatctgaggcccaacatcaagcatggaaacatcacccaagaagaggaagaaatcattattaacttgcaccgagttcttggtaaccgttgggccagcatagcgagcagactttcaggaaggacggacaa

SEQ ID NO: 1952 - DNA, 475 bp, Eucalyptus grandis
ctcccctctcctggctctcgctctctctctctctctcagttctttctcggacgggtgtctgtgcgtggcttttgatcggtcatcacctgaggccgcgtctgcaagcaagtgaagaaggaggacaaggaatatggcgagagagaagatcaagatcaagaagatagacaatgtgacggcgaggcaggtgacgttttctaagaggagacgagggcttttcaagaaagccggagagctgtcggtcctgtgcgatgccgaggtcgctgtcgtcattttctcggctaccggcaagctctttgagtactccagctccagcatgaaggacactcttgagaggtacaccctccaccacaataatcttgagaatatggaccaaccttctctcgagctgcagctggagcatagcaataacatgaggttaagcaaggaagtggcagaaaagagccatcgactcaggcagttgaggggtgaggatctt

SEQ ID NO: 1953 - DNA, 541 bp, Eucalyptus grandis
atcgcccccgttctctccctctctctccctctcccccctaacgtttctggccctcttctttgtctggacaaaaagatgggaagaaagtgctctcgctgtgggaacataggccataactcaaggacttgcacaactttcatgggggcagcaagtgcttgtgggctcaagctcttcggtgttcaacttgacctatcttcttcttctcctccttcatcatcagcatctagtggttctgctcatccttattcacttgtcataaagaagagcctcagcatggatcgtctgtcttcttcctcggcctcctcctcgtctccatcttcatccctctcctcgccaagagttcttgctgatgaacactgcaataagacctccctcggatatctctctgatggcctcgccgctagatcccaggagaaaaggaaaggagttccgtggacggaagaagagcatcggacattcttaatggggctagagaagatggggaaaggcgattggagaggcatctccaggaactatgtgaccacgagaaccccaacccaag

SEQ ID NO: 1954 - DNA, 437 bp, Eucalyptus grandis
cgcggttggcgtcagatagaagagcatgtaggaaccaaaactgcagttcagatacgaagtcatgcccaaaagttcttctctaaggttgctcgcggggtaagtggcagcagcgagggtgtgattaaaccaattgaaatacctcctccacggccaaagcggaagccaatgcatccatatccacgcaaatctgtcgattcaaaggaggtgaaactgtcctatcaacaagagaggtctccatctccaatctcttcggtagcagatgaaaacactggatctcctacttcagttttgtctgctcatggttcagacatgctgggatcagcatctttgcatcaacaaaacagatgctcttcaccgacttcatgtaccactgatgtaccctctattggtctagctgtaattgagaagcaacctgaaatattcaaagaagaagataa

SEQ ID NO: 1955 - DNA, 470 bp, Eucalyptus grandis
attcggtcacgagttcacttcgtcgcctgcctcgtcgtcctccctgtcctcctcgcgaatctccatcggcgagaactctgataaagcatccctcggctatctgtcggatggcctgctgggtagatcccaagagaagaagaaaggagttccatggacagaggaggaacacagaaccttcttggtggggcttgagaagcttgggaagggtgattggagaggcatctctaggagctatgtgaccacaagaacaccggcccaggttgcaagtcatgctcagaaatatttcctccggcaagtgagcttcaacaagaaaaagcggcgctcgagcctctttgacatggttgatgtcaaaaccgcggcgggtgatcgtttaggcagtttgacggccaagccgagtgagtcagttcctaattgcaaaatgggaaccttgatgtctcatttgcaagttcatgatgccagaaccactcagc

SEQ ID NO: 1956 - DNA, 384 bp, Eucalyptus grandis
ctgaaatttcgtcttcaagccatggaacaacaggcgcaactacgcgatgccctgaatgaagcattgactgctgaggtgcaacgattgaagcttgcgacagcagagctcaactcggaatctcatccttcaaagtgcatggtttcacagcttcctgtgagctcccaaatgttccagctccatcagatgcaacagcagcagcagtctcagcaacaaactcaatcacagcagcaaaatggtaacacaaccacaaagtcagagtcgaatcaataggacgtgggtggtccaacaactccggcgcctggacaaacctcacttgtctcggttcttcgacaccctgcagtagttctctagtgcatccattcattcattagtttttgcatatgc

SEQ ID NO: 1957 - DNA, 388 bp, Eucalyptus grandis
gtttcctcttcaggagaaagcaaggagctgtagaggaattgaaaatggtgcaagaagtccgaaagggtccatggacagaacaagaagatttccaactggtgtgctttgttggactttttggagatcgccgatgggattttatagcgaaggtatcaggtttgaaggtggcgggagaaaataataggattgaatagaacaggaaaaagctgcagactacgctgggttaactacctgcatcctggcctaaaacgagggaagatgacacctcaagaagagagactggtgctcgaacttcattccaaatggggaaatagatggtcgagaattgctcgcaagctaccagggcgaacggacaatgagataaagaactattggaggactcatatga

SEQ ID NO: 1958 - DNA, 455 bp, Eucalyptus grandis; identical to SEQ ID NO: 60

SEQ ID NO: 1959 - DNA, 965 bp, Eucalyptus grandis
aagagaaaagatacaatccgccgtggacccaagaaggtcaaagcccgctctctgcacgatgatgggtagtagtagtagtactacttatcttccgtgaggtctctcgaattagggttttcttgattttcgccaaccccccaatatttatcttttctttctttcctttttttcgcttctctcgcagttcacctagaaaagctacgagggcttcgcaccagttccgtacggggctgcttcagtgcgtagcgtgtactatctcgtctcaggtggtgtttcgcttttatggggatgtccttcggcgggggcgtttcgaagattcttgtagctccgtagcttgtcctgcgggatttggttgggccgatcgtcaggtttcttccagttaaagttgcgatttttaaggggagcgagggcgtttgagctggtaaagttcgaagctttttgagttcggccgccagggttgtgtcctagagataactggaggcgaaagggtgcgttccggtccggtcagcatccgctgactcaggagatggttgggggttgttggtggcggcggtgatgatgattcatgggtagtaggactagagttggcggtggtggagatgatggcagagttgtgaacggcatgccgagcttcgtccctcaattacccacttcgaattccatgggatcagaaggaaactccattcgttcttctcgaattacagactttggaacacttgagcagtctcttggataccgcatagaagatgcagttgacctcagcagaaatcctgtcttcaatcagatgaaatcaagtgcccaggctcttggggctgatgtccaatttggctctttgaataagtccctttcatcctcagacagaaatctttctgtgaatattgtggggtctcagactctatctatgcatagagaatcacaatcaaacttagtatcaatacccggtgctcatcgtgagaactgggggg

SEQ ID NO: 1960 - DNA, 599 bp, Eucalyptus grandis
gtccggtccggtctcctccctcccttcctccctccttccttctctctctctctctctctctctctcgccgtccaaccgtacggactctcggttttgccgcgaaacggaacggagcggacccggtccctcgccgtcgccggtgcgagagaatgcctcccccacgcgccgccacccccgacgtcgccggcgacgagagctccggcgccgacgccggcgccggggagatcatgctgttcggggtgcgggtggtcgtggactcgatgaggaagtgcgtgagcctgaacaacctgtctcagtaccagcacccgcaggacgcgaatccgcccaacgccagcggcgggagcggcggcaacaaggaagaggccgccaaaggctacgcatcggccgacgacgccgcgcacaaccccggcggtggccgcgagcgcaagagaggagttccttggacagaggaggagcacaggctgttcttgttgggattacagaaggtggggaaaggagattggagagcgatatccaggaactttgtgaagacccgcacgcccactcaggtcgcgagccatgcccagaaatatttcctgcgccgaagcaacctcaatcgc

SEQ ID NO: 1961 - DNA, 377 bp, Eucalyptus grandis
ggagaacgtggcttctgggtcgactgagcggccgagaattagacatcagcatagccagtctatggacgggtcgacgagtattaagcccgagatgcttatgtcgggttcagaggatgcatctgctgcagacgccaagaaggccatgtctgctgcgaagcttgctgagcttgcactgattgatcccaagcgtgcaaagaggatctgggcaaacagacaatcggctgcaaggtcaaaggaaaggaagatgcgatacatagctgagctagaacggaaagtacaaactttacaaactgaagcaacaactttgtctgcacagctgactctgctgcagagagacacaaatggtttgactgctgagaatagtgaattgaaactgc

SEQ ID NO: 1962 - DNA, 317 bp, Eucalyptus grandis
aagtaaaatcccctctcggctcctctttcttttatgtacattccaagaacagcgacagataaggccccgagatctgcaagtcttcttcacactactcgctgatggctgattctgaacattcttcttctgatgacacttacgtggactctagagaagagacaagtgaagaatcaaagctagatttctctgaagatgaggagacgcttgtaattagaatgtacaacctggttggagaaaggtggtctctaattgctggtagaatcccagggaggacagctgaagaaatcgagaagtactggaattccagatattcaaca

SEQ ID NO: 1963 - DNA, 471 bp, Eucalyptus grandis; identical to SEQ ID NO: 74

SEQ ID NO: 1964 - DNA, 372 bp, Eucalyptus grandis
tgacactgaagattcgaagaagaaagagaggcatattgtgacttggtctcaagaggaggatgatatactccgggagcaaatcggtatacatggaactgagaactggtcgattatcgcatcaaagttcaaggataaaacgacgagacaatgcagaaggagatggtacacatatttgaattctgacttcaagaaagggggttggtcacccgaggaagatgtgcttttatgtgaggctcagaagattttcggcaacagatggacagaaatagcaaaggtggtttcaggcaggactgacaatgccgtaaaaaatcggttcacaaccttgtgtaagaaaagagcaaggtacgaagccttagcgaaagagaatacact

SEQ ID NO: 1965 - DNA, 424 bp, Eucalyptus grandis
atgcaattttgagcgtcgcgagtaagccggagcgaggggagagcgatgggcaggcagccgtgctgcgacaagcttggggtgaagaaagggccgtggacggcggaggaggaccggaagctggtcaacttcatactcacccacggccaatgctgctggcgggccgtccccaagctcgctgggctccgccgctgtggcaagagctgccgcctccgctggaccaactacctccgccccgatctcaagcgtggcctcctcaatgaagccgaggaaagcctggttatcgatctccatgccactctcggcaataggtggtccaaaatagcagctagactacccggaagaacggacaacgagatcaaaaaccactggaacacccatatcaagaagaagctcattaggatgggcattgatccagtcactcaca

SEQ ID NO: 1966 - DNA, 427 bp, Eucalyptus grandis
cccggctcccgctcgtccaatcggcgcgtcgagaggaagaaaggtaacccatggacggaggaagagcatcgaaggtttttaattggtctccagaaattgggtaaaggagactggcgagggatagctcgtgactttgtgactacaaggactcctactcaagtggcaagccatgcccagaagtattatatccggcagagtaatgctggccgaagaaagaggcgctccagcctttttgacatggctccagatatggtttgtcttctctatgatgttgcttctgcacattcattgcactccgttcaaatatccggctcgtgcatgttttaagatgttttcttagctcatgctgacatatgctttaaccatgcactagtgatgattacatgataagggccattcctcttagacctttgggacacatcaaatg

SEQ ID NO: 1967 - DNA, 373 bp, Eucalyptus grandis
cttgaaacttctccgctcttctcttctctctcttgaaaggaaggatgagaaaaccttgttgtgacaagcaagacacaaacaaaggagcatggtcgaagcaagaagaccagaagctcatcgactacattcgcaagcacggcgaaggatgttggcgaactcttcctaaggctgccggtctcctccgttgcgggaagagttgtaggctaagatggataaactatttgcggcctgacctcaaaagaggcaactttgctgaggatgaagaggatcttatcatcaagcttcatgctctcctaggcaaccgatggtcgctaattgctgggagattgcccggacggacagacaatgaagtgaagaactattggaactcaca

SEQ ID NO: 1968 - DNA, 197 bp, Eucalyptus grandis
ggtcgcccgaggaagacgagaagctcttcaactacatcacccgattcggcgtcggctgctggagctctgtaccgaagctcgccggactccagagatgtggaaagagttgcaggttgaggtggataaactacctgaggcctgacctcaagagggggatgttctctcaagaagaggaggatctcattgtcagtctccac

SEQ ID NO: 1969 - DNA, 365 bp, Pinus radiata
gcaaaatcttatttgggttcccttacagaaactatacagtccctgaatgctgagcttgaaagaactagatcggagttggttgaagcaaagaagagagaggaagagattatttcaaaagaagctgaaagagtagagaagaataagagagaagtggaaaatctggaactcaatcttctgcaaactactgcagaagctgggcgagctaaactggaactagagactgcttatgaagaggtgcagagcgcaagacttgaaactgcgcaattgagggctgctttggaagccacagagggaaaatttgaagcaatgctgagtgagactaggttggaggcagagcatgtcaaaggagctattgagaagtataa

SEQ ID NO: 1970 - DNA, 260 bp, Pinus radiata
gaaatattggtgactcaaatagagcaacttcaaagaaaggaacggatgtttagcgaagagaataattttctccgaaagcggattgtcgatccccattccgttttgacaactcctgcaagtggatctggaagcctccaaagaagtgaagtcgagactcaactggttatgagaccgcccagttcaaatgctgattttctttttaatagttctcattgataatcactgtattcatatctttgttattaatttattatgaaatg

SEQ ID NO: 1971 - DNA, 332 bp, Pinus radiata
tctctctggtgtggggggcactcaaaatggggaagacgaagatggagattaaacgcattcaaaaccctagccgccgccaggttactttctcgaaacgcaagaacggattgctaaaaaaggcattcgagctttctgttctctgcgatgctgaagtcgccctgatcattttctcggaaactggcaagatctgcgagtttgcaagccacgacgacatggcaacaatactggaaaaatatcgaatatacacggaaacacatggaaacatggagtcctcgtcggtccaaagcgtgaagattggtgaatcacaactcaaagcgttgcgtgagaagatg

SEQ ID NO: 1972 - DNA, 413 bp, Pinus radiata
cttcgaggtgctaatggctgcacaataccttcaattggattgacaagcatagaacgcgtggaagttcagactcaactggtcatgagacctccacatgccacagagatggacgacaactttatggatgttgacaacgtgccactatctggatgatgtttttctgtttctgttacataatatggccactgatgacaccatactttattttggtatttgctttaaaaatgactctttctttcactgacttttgatggactgtatgatagttgatttttggtcctcatactttagcaaatggttatgggtacctgttttggcccgaggccttggaggatctactctctatatgttactgttttactttttacatttgtgctcactgactcatatgatggacttgcccacatatgatg

SEQ ID NO: 1973 - DNA, 521 bp, Pinus radiata
agaagatgggagcttggtgatctgtgaaagatctctctctgcggctcaaggtatgcctatggtatcacagtctcaaagctttgtgcatggtgaactcttatctagtgggtatttgatccgaccctgtgaaggcagaggagcattagtcatcatggttgatcacaggaacttagaggcttcaagtgtccctgaagcacttcgtcccttatatgagtcatctacattctttgcacagaagatgacagttgaggcttcttatcatcttcaaggtaaagttcaaccggaaatgatttccttatcaaaaaaactccaacagccatgtaatgtacggtcatacagtcaacggctttgcagaggctttaatgaggcagtcaacacattacctgatgatggctggatgtcattgtccaaagatgggctgggggatgtcactatttgtgtaaagtctttgtcaaattgccgaaaccaaatgtcatcgtcaaatagcctatgttcaacagacatgggcatcttgagtgaaa

SEQ ID NO: 1974 - DNA, 461 bp, Pinus radiata
gaaaatgaaagccttcgagctcgtttaaggcatatgaatggcgatgacatcaattcgttgaagcttcccgaactcttccatctcgaacagcagcttgaaacggccgcaacccaagttcgaagaagaaaggatcaagttttagacaacgaaaaaatcaagcgaaggaacaagatgcgccgtaaggaagacgagaacatcattcttcacgaaatgcttgaccagcaccatggacaaatggaggaggataacgctcagattaatttcctattttgccaaccattaaatagatcggatactactttccctgcatcactactccgcctgcaaccaaatcagccaaatttgcaggatattggatattaattactgaacggaccatctgtgtgcatcataatgagaaggtcatggacttctcagtaacagtcaattatgaaaattcgaagtttgtgaggaaaaaaaaa

SEQ ID NO: 1975 - DNA, 499 bp, Pinus radiata
tgagcccccaggtggagcaccgacctttcagcccacatgaagacgccaccatcatacaagcccatgcgcggcatggcaacaagtgggctacgattgcccgcctcctacccgggcgcaccgacaacgctatcaagaaccactggaactcgactctgcgacgtcgctatcatggcgagaaagaccagagcaacgggctagctgtgaacttggagtcggcagctgaggacaaagaaacgatgactccgatgacacctgtcacagccacggcaacggcaacggcaacggcaatgccagtggctttagtgttcccaacggctgcagacaacgtcaggaagcggagcaacagtagctgcagcgctaatgacaatccaggagatgccgaggtcgaatcctgtaggcttaagaggctcaatttttctgaatccccatctagttctgaaaatattaataataataacaataatgaagaagctgttagtggccattgcaattcggccgc

SEQ ID NO: 1976 - DNA, 419 bp, Pinus radiata; identical to SEQ ID NO: 399

SEQ ID NO: 1977 - DNA, 459 bp, Pinus radiata
gcaagctggcctccagcgttgcgggaagagttgcaggcttcggtggatcaactacttgagaccagatctgaagcgaggcacattctctccgcaggaagaaaatctcattgttgaactgcattcagtcctcgggaacaggtggtctcaaatagcaacacacctgcccggaagaactgataacgagatcaagaacctctggaactcgtgcattaaaaagaagcttaggcaacgaggcatagatcctaacacgcacaggcctctcagcgaggtgaatgccgaggcaggggattctaagaacgataacagcaataaagaagtcgaaactcaggcagccatggacgaatctcatgtttctgcagggaacgaattcaagcatctgaatgcaattcctagggctgatacggccaatcctaaattctttcatgttcccgttgaggacaacactttgattgctagcga

SEQ ID NO: 1978 - DNA, 331 bp, Pinus radiata
ggagagtgcaccaccgagatccacgcagtcgaagagaaagagaaatctgcaggaggagttgaaaatgaggtgcacacgatggcaaggtctcccattttcctccaaaccaaaagttaaaaagggtctctggtcgcctgaggaagatgagaaactcatcaattatatgatgaagaacggccttctcggctgctcctggagctatgtggccaagcagattggtctgcagagatgcggaaagagttgcagactgagatggactaactacttacgtcctggccttaagcggggtgcaatttcgcctgaggaggagcaattgatcatacacttacag

SEQ ID NO: 1979 - DNA, 375 bp, Pinus radiata
gttctatcaaacttcttatccaccatacccatttccattagacggctgaattctcagatccaatttgttccagccctctagcgacagaagaagatgggaagagcaccctgttgtgacaaggcaaatgtcaaaaaaggaccttggtcaccagaagaagacacaaaactcaaggcgtttattgaacagcatggcactggtggcaattggattgctcttccacagaaagctggtctgaaaaggtgtggaaagagctgcaggcttagatggttgaactatttgaggccagatataaggcatggtggtttctcagaagatgaagataacatcatttgtagcctctatgcaagcattggaagcatggtgtctataattgca

SEQ ID NO: 1980 - DNA, 749 bp, Pinus radiata; identical to SEQ ID NO: 361

SEQ ID NO: 1981 - DNA, 339 bp, Pinus radiata
cttggctggggaagacaacccgctgcattacggacatttagccagagattgtgcaagggtttcaatgaggcagttaatggcttcacagatgatggatggtctttgatgggtaacgacggaatggaggatgtaactattctcgtcaattcatctccaagcaaactgttcggtcaacagtttgcttcttccgatgggcttcctgctcttggtgggggcatcctatgtgccaaggcttctatgctattacagaatgttcctccagcattgcttgttcgtttcttgcgagaacatcgatcagaatgggcagatagtaatattgatgcctattcagcagcctct

SEQ ID NO: 1982 - DNA, 373 bp, Pinus radiata
ggattccgacccttccggctaaagctgcttcatttctgtgtgtattgaagatggggagatctccctgctgtgaaaaagctcatacaaacaaaggggcgtggaccaaagaagaggacgatcgcctcatcgcccacattcgaactcacggcgaaggttgctggcgctcgcttcccaaggccgcagggctgatgcgctgcgggaagagctgcaggctccgatggataaactacctgcgtcctgatctgaagcgtggaaacttctcagaagaagaagacgaactcatcatcaaactccactccctactcggcaacaagtggtctcttattgcaggcagattgcccgggcggacggacaacgagataaagaactactg

SEQ ID NO: 1983 - DNA, 404 bp, Pinus radiata
aggcaataagtgttattattgagaacttgactgtggctgagattttcagggatggaccgttcaaactctgcgactggagaagaagatgtactgtcaagatgcagggaaagaaaacgtttcatgaagctggcaattgagaacaggtataaactagcaacagctcatgtggcttacatggattctcttaggcgtatgggcaccggtcttcggctttttgctgaaggcgaaacgatgtcggagtcttcctattccacatcacccatagggacttctgaacttgctgttgtcttgcctgagaaatccgtatccccatctccatttccatcctcatccccttcactttctcaacctcaaagtccccgttcagagagagcagaatctcgatctccactcgacagcttctc

SEQ ID NO: 1984 - DNA, 332 bp, Pinus radiata
cggacggcttggttcaaaactctcgtgaaagaaaaaaaggcgttccttggacggaagaagaacataaaatgtttttattagggcttcacaaattgggaaaaggcgactggagaggtatttccagaaactttgtcacttccagaactcctactcaagttgctagccacgcacaaaaatattttcttaggcagagtaatttgaacaaaaggaaacgaaggtcgagcctgttcgatatatccactgattcgatggaagattgctatcaaggaatcccggagctgtcaccggtgatgcacgatctcagcctgggccagaattcatctctgacctct

SEQ ID NO: 1985 - DNA, 526 bp, Pinus radiata
ctcctctcccgtctccaaacccaagctaaggaaaggcctctggtcgcctgaggaggatgataaactcatcaactacatgatgaaaaacggccagggttgctggagcgatgtcgccaagcaagctggtctgcagagatgcggaaaaagctgtaggctgaggtggattaactatttaaggcccgacctcaaacgcggtgcattttcaccccaggaagaacaattgatcatacacttgcattccattctcggcaacaggtggtctcagattgcagcccgtttgcccggacgtacggacaacgagatcaagaatttctggaactcctgcataaagaagaagttgaaacacctttcggcctccaccaacaacagtaaatctatctctgcacctaatcgtaccagtaccatgaattcatcgatcacgcccttttctgaatcgtctgccgagccattggaggtcatggcaacaaggtatcagccatcgaatgcttttaatcatgaagtgcccactgcagaaaatcaagttttg

SEQ ID NO: 1986 - DNA, 366 bp, Pinus radiata
atcagactcacatcaaacgaaactggagccgtgaagggttagttgcggtgttaaattctaggacagctttccgtattagaaagaggcgccctttacgggagtcggcaccaaaccagagtggagagaaataatgggtagggctccctgctgcgaaaaggttgggctcaagaagggcccctggacgccggaggaagatcaaaagctcctcgcttacatacaggagcacggccatggcagctggagggctctgcctcagaaagctgggttgctaagatgcgggaaaagctgcagattgcgttggactaactatctaagaccagatatcaagcggggaaagttcaacccacaggaagaacagacaattat

SEQ ID NO: 1987 - DNA, 476 bp, Pinus radiata
ccgaactccccgctgtgatcaaatgggattaaaaaagggaccctggacacctgaagaagatcaaatactcatctcctatatcaacaagcatggtcatggaaattggcgtgcgctgcccaagcaagcaggacttatgcgatgtggaaagagttgtcgcctgcggtggacaaactatctgagacctgacataaaacgtgggaacttcagtctcaaggaagagcagactattattcatctgcatcaaatccttgggaaccgatggtcagctattgcctcacacctccccggaagaacagataatgagataaaaaatgtatggaacactcatttgaaaaaacgcctcctgcaaattggggtagacccagtaacccacgcgcctagaggatacaatgtatctaactgttacaccgctgtgaatatccgggaccatcatggcgagcaggccgatcatcagctccaaagccatgtctgcgttt

SEQ ID NO: 1988 - DNA, 151 bp, Pinus radiata
ggacacctgaggaagatcgaattcttatctcctatataaaaaggaatggccatggaaagtggcttgcactgccgaaacaagcaggacttagccgatgcgggaagagttgtcgactgcggtggacaaactatctgagacccaacataaaacg

SEQ ID NO: 1989 - DNA, 461 bp, Pinus radiata
gtaacccatcaggagttctcttctgtccaacccccctaactctccacttcacagatctcatgagacttaacctgttctaacgttgcagggcaataaccctctttgtctcttgttctgtattttttgctttttgaccacagagcaggttcaacaagcttgtacaaaggacgcactgaaaatgaaggatttttactgcagcttatgttaaggtttattttatataaacgatgggaactggggaagaagcaacgccaactaagcctgctgccaaaccatcttcctcctcccaggagacaccgacaacacctgtttatccagattgggcagctgctttccaggcatattatggtccaggtgctaccccacctcctcctgccttttttgcttcaacagtgggatctgcaccaactccacatccatacatgtggggtggacagccgttgatgccaccttatgggact

SEQ ID NO: 1990 - DNA, 418 bp, Pinus radiata; identical to SEQ ID NO: 344

SEQ ID NO: 1991 - DNA, 321 bp, Pinus radiata
actaaagcagctataaagagactgcagtctcagataatggttgcattccaggcagttgatacaacttctgcagcaattctgaaattgagagaagatgaactctatcctcaactcgtggagctatctaaagggctaatgcagatgtggagggccatgtatgaatgccaccaggtccaaaatcatattgtccaacaggtgaggcatttgggcaatctggcaagcgcagaggccacaagtagttaccatcagcaggcaaccattcaattggaagctcaggtgactgcttggtatgacagtttttgtagaatgataacgagccag

SEQ ID NO: 1992 - DNA, 390 bp, Pinus radiata
gagaaaacctaagtcctctcgcagcaagcaagccacgcattccctctctacgactcgggtttggtgtagaaggcagagatttactttgtttctgcttgtttgtcggtcttcaccttcaccttcagacaacatttgtctgaaccgcggaactagctcttgaaatattgaaacccacctaaatcgcaggggattggtggatgttagcagtggtcacagagcggtagagctagggaaaatccatatacaactacatacacagatacccattatcagccatgggcgctccgaagcaaaaatggacatcagaagaagaaggtgctctgcgagcgggcgtggagaagtatggcgccggcaagtggcagaccattctcaaggacccagagttcgcct

SEQ ID NO: 1993 - DNA, 476 bp, Pinus radiata
gcagtggtcatatggatgggggatccggagaggaccaagatgccgccgatcaagatcacgatcacgatcacgatcatgatcacgagcagcagcagacgcggaggaaacgttaccacagacacactgctcgtcaaattcaggagatggaagcgttgtttaaggagtgtccacatcctgatgacaaacaaaggcagcggctcagcattgaattgggccttaagccgcggcaggtgaaattctggtttcaaaatcggcgtactcagatgaaggctcaacaggatcgctcagacaacgccattctccgtgcagagaatgaaaatctgcggaacgagaacgtagcactccgagaagcaattaaaaatggtgcttgtccaaactgcggagggtctacatcgctgggagagatgcctggattcgacgaacaccatttccgtatagagaatacgcgcttaaaggaggagcttgatcgagtgtct

SEQ ID NO: 1994 - DNA, 429 bp, Pinus radiata
gataaactgagtgagcaaaattactcagaaagaaggaagagcagaacaattcgcccggaggaatgggttgcacacaagggcaacgacaaggggaatgggaagggaaaggcgtcccctcgaattcctcaaggcgaagtctaagaaaaggtctctggtcaccggatgaagatatagaacttaccacctatatcatgagaaagggcctcatgggctgctggaactatatcgccaagcaggctggtctgcagagatgtggaaagagttgcaggctgagatggattaactacttgcgacctggtcttaaacgttgtgcaatttcaccccaagaagagcgactgataatacagttacaatccagtctcggtaacaggtggtctcaaatcgcggcacatttaccgggacgcacagacaatgaggtcaagaattact

SEQ ID NO: 1995 - DNA, 321 bp, Pinus radiata
agcgcgtctctgtgaaaatggggagatctccgtgctgtgagaaggctcacaccaacaaaggtgcctggacccaacaagaagatacccgccttgtcgcccacattcgagcccatgggcaaggcggctggagctcgcttcccaaggcagcaggactgctgcgctgtgggaagagttgcaggcagcgatggataaactacctgcatccagatctgaagcggagtaacttttcagaggaagaagatgaactcatcgtcagactccattcgctcctgggaaacaagtggtctcttattgcggggagattgccggggaggacagaca

SEQ ID NO: 1996 - DNA, 402 bp, Pinus radiata
ccgcctcctacccgggcgcaccgacaacgctatcaagaaccactggaactcgactctgcgacgtcgctatcatggcgagaaagaccagagcaacgggctagctgtgaacttggagtcggcagctgaggacaaagaaacgatgactccgatgacacctgtcacagccacggcaacggcaacggcaacggcaatgccagtggctttagtgttcccaacggctgcagacaacgtcaggaagcggagcaacagtagctgcagcgctaatgacaatccaggagatgccgaggtcgaatcctgtaggcttaagaggctcaatttttctgaatccccatctagttctgaaaatattaataataataacaataatgaagaagctgttagtggccattgcaattcggccgc

SEQ ID NO: 1997 - DNA, 375 bp, Pinus radiata
ttagcttgcagaaaatgaggtgcaaaacagggcaggcacaaggcgtattggaagttgaaggcactcaccctgctccttccaaaccaaagttaagaaaaggtctctggtcacctgttgaagataaccagctcaccaactatatcctgagaagaggcctcgtcggctgctggaactatgtggccaagcaggctggtctgcaaagaaccggaaaaagttgtaggctgagatggattaactacttacgccctggccttaaacgtcatccaatttcacgccaagaagagcagctcatcatagaattacaatccattctcggtaacaggtggtctcaaattgcggcacagttgccgggacgcacggacattgagatcaaga

SEQ ID NO: 1998 - DNA, 466 bp, Pinus radiata
acaacagcttgaatctagtcgaataaagctgaaacaaattgaacaagagcttgagcgagtgaagcaacagggaatttccatcaatggacatttgggcgatcataatggatcaggggctgctgcatttgatatggaatatggccgttgggttgaagaacaaaacagacaagcccgtgagctcagggcttctttacaagcacacctgacagatagcgaactttgtgttctggtggataatgctatagctcattatgatgaactctttcgtatgaagggtgctgcttccaagttggatgttttccatcttatgtcaggcatgtggaaaactcctactgagcgttgttttatgtggatgggaggttttcggccatcagagcttctgaagattcttactccacaaattgagcctttaacagaacagcaatcattcgcagtatctagcttgaaactgtcatcacagcaggca

SEQ ID NO: 1999 - DNA, 243 bp, Pinus radiata; identical to SEQ ID NO: 368

SEQ ID NO: 2000 - DNA, 642 bp, Pinus radiata
cgagcgcgaaagactgaaatattggtgactgaaatagagcaacttcaaagaaaggaatggatattaagcgaggagaatgctttcctcggcaaaaagttcgtgcatcctcattccgtttcgaaaactcctggaagtgaatcgggaagcatccaaaacagtgaagtcgagacgcaactggttatgagaccgccatgtacaaatgctcattttcttattaatagttctcattgataatcaatgtattcgtaactgtgttatcaatttattatgaaaattttatattaataaaaggtaaagctgcttctcatatcgcacctaattgttcaccacgtccaaaaaaaggctcttgccaagtgaactaaatgttttttgaaccgaagtctgtcttccaaactcagtatgtaagcttgctatgaatacatactttaaaggttttgtattagcattacgagcggagttttcctcattcatccgatgagcatgaagagtgaggagtataatattgacgcatgtggagaatttaatgttgcatatactcctacgtgtatatatgtgatgttttatatatatatatatatatatataatatcgatttgaatctataaaattttaaattatatatttagtttaaaaaaaaaaaaa

SEQ ID NO: 2001 - DNA, 485 bp, Eucalyptus grandis
gagagagtctgcaaactgcgcgtcccgcgtcgccgatcgccgggagaatcgccgccggcgagatatggggaaccagaagctgaagtggacgaaggaggaggaggaggcgctcctcgccggaatcgccaagcacggcgccggcaagtggaagaacatcctcaaggaccccgaattcgcccccgccctcgtcaatcgctccaacatcgacctcaaggacaagtggcgtaacttgagcgtcggtacttctggacaaggttctagagataaacaaaggctgtcaaaagtgaaaagtctgatggccgctcctcagtccagtaccgtgcctctaaatccacaagctcatgctgcatctactgatgttgcattggtcaattcttcaaatagctttcaagatggcaaaaattattcactgtgggtatctgtgctccttttccttttcagtaacggcaatcttttttacttctatcctttgttatcctttctgt

SEQ ID NO: 2002 - DNA, 356 bp, Eucalyptus grandis
cgactcgtcagtcagctcgtgcactccttgcaattcatgattatttctcccgacttcgggcccttagttccctctggcttgcccgtccaagagaatgaagaggtcatggtctatgcaggctgacatgtacattggtgatctttaggaagctatcagttttgaagtagtttcggacctagaactggtttatttctagttttcttcattttttttttctttggctataattattttttctttcttagacacgaagtcacagagaattgattgatggtatgctaagctatcataggttgggattgcattgttctcattgaagatactgctaattgtgtaggcactcctgttcattagtc

SEQ ID NO: 2003 - DNA, 713 bp, Eucalyptus grandis
tctccatccaaattcccaccttcctcccttcctccctttccccctttccttccttctgcaccgaaggaagcccccgcttcgcaagccacctctcggtaaagttcgctcctttttgggtcggcgaatcttgggtcgatcgatggcttcgaggaaggaggtggatcggatcaagggaccgtggagccccgaggaggacgaggccctccgcctcctggtgcagaagcacggcccccggaactggtccctcatcagcaagtccatccccgggcggtccggcaagtcgtgccgcctccggtggtgcaaccagctctccccgcaggtggagcaccgggccttcaccccggaggaggacgacatcatcgtccgcgcccacgcccggttcggcaacaagtgggccaccatcgcccgcctcctctccgggcgcaccgacaatgccatcaagaaccactggaactccaccctcaagcgcaagtgctcccccccgctctccccgctcgccgaggaagggaacaacagggcgttcgacgctgccgcggggtacgacggggacttgagcccgcgggagcggccggcgaagcggtcggcctccgccgggccttgcctgagccccggcagcccgtccggatccggcatgagcgactccagcgtgcacttcgtgtaccggcccgtcgcgaagaccggccccgtggtgcccccgacggtcgaggcgacgg

SEQ ID NO: 2004 - DNA, 341 bp, Eucalyptus grandis
acaggttgctcaattaagagttgagaattctactttactgaaacgtctctcggacataagccagaagtacaatgtagcagctgttgacaacagagttttgaaagctgatgtcgaaaccttgagagcaaaggtgaagatggctgaagagacggttaaaagagtaaccggactgaacccaatgctgcatgtgatgtccgacatgtcttctgtgggtgtgccaccatttgatggtagtccttctgatacatcagcggatgctgcagttcctgtgcgagatgacccaaagcaccaattctatcaaaccaattctagtaaccccgcatcatctgctgacgatatga

SEQ ID NO: 2005 - DNA, 1403 bp, Eucalyptus grandis
ttctttcttcaccctctgtgcatgaattttcttgggccatgctcatgcattctcctcctctttcttcatcaccatcgtcatcgtctctgactttgatgggttggcgagggggggagctgagggagagggagaggagaggagagaggagcggctgtgcgttcgcgtgcagggctgcacgaggtgttctcgtttcgggcgcgggcgctctgcttccatggctgcttttaagtaagacgccaaaagaaaacctttttgctctctcgagtgtcatgaactcgcactgaaagtgcgcgccgaaccgagaagaagaagaagaagaagaagaagaagaaagagaaaccatccccttagaaaacgcgaaaaagagtaaatagtaaaaagagcaagcttgatcttacttgatctaaaacattaagatccttctctgttcgagagaagtcacagtcccgctttttccagacatgaagagacttggcagctcagattcgttgggtgctttgatgtccatctgcccaccttcagaggaattgcagcacagtccgagaaacggcaaccccatctaccacagcagggacctgcagtccatgctggagctgggcctcgacgaggaaggctgcgtggaggaccagtccgccggcggcggggggcacgtcggcggcgagaagaagcggcggctgagcatcgaccaggtcaaggccctggagaagaacttcgaggtggagaacaagctcgagccggagcggaaggtgaagctggcccaggagctggggctgcagccgcgccaggtggccgtgtggttccagaaccgccgcgcgcggtggaagacgaagcagctggagcgggactacggcgtgctcaagtccagctacgaggcgctcaagctcagctacgacgccctcaagcacgacaacgaggcccttcacaaggagataaaagagctgaaatcgaaactccgggaagaagacgacaaccccgagagcaatctctccgtcaaagaagaggtcatcatccccggccacgacgtgtcggacaagatccgggccgcagacgacggtgacgacgacaccaaacgctctcctccccctccgatcaccgccccgcctcgcgagctgagcttcaacaatggtgggctgaaggacgggtcgtccgacagtgactcgagtgcaattgtgaatgaagagaacgcggcgaccagcagcagcagcccgaaccccgccgtccagagccacggcggcttcttgaaattcatggggtcatcgtcctcttcggcctccccaccgccgtcgccaccggcttccttcggcgggtgcttcagcttccagttccagcgagcgtaccagcctcagcctcagcctcctcatcaccaccaccaccacagtccgtacgtgaagatggaggagcac

SEQ ID NO: 2006 - DNA, 283 bp, Eucalyptus grandis
gagaggtacaagagtgcatgcagtgattcctcacatccacagtccgtttctgacgtgaacactcagttttatcagcaagaagcatccaagcttcggagacagataagagaaatccaggtctcagataggcatcttctaggtgagggtataagtgatttgagcttcaaggatctcaagaatctcgagagcaaattagagaaatcgatcagccgtgttagatcaaagaagaatgagatgctttttgccgagattgagtacatgcagaagaggggccttgtgcagg

SEQ ID NO: 2007 - DNA, 252 bp, Eucalyptus grandis
agagaacaagataaacaggcaggtgaccttcgctaagaggaggaatgggctgctcaagaaggcctatgagctctctgtcctctgcgatgctgaggtcgccctcattatcttctccacccgcggcaagctctatgagttctgcagcagccctagcatgctcaaaacgctcgaccgttaccaaaagtgcagctatggatccgttgaagttaacaaaccctccaaagaactagagaatgcctaccgggagtactt

SEQ ID NO: 2008 - DNA, 386 bp, Eucalyptus grandis
tctagatccaccaccagcagaaggaggtagaagggggagaaggaggagaaggaggaggagatgggtagagggaagatagagatacagaagatagagaacgacacgaacaggcaagtgacctactcgaagcggaggaatggcatcttcaagaaagcccacgagctcaccgtcctctgcgacgctagggtttccatcctcatgctctccggcaacaagaagctccacgagtacatcagccccaccaccacgacaaaaaggatgattgatgattaccagaaggctcttgggatcgatctgtggactacacactacgatagaatgcaagaggagttgaggaaactgaaggaggttaataacaattttcggaaggaaataaggcagatatt

SEQ ID NO: 2009 - DNA, 123 bp, Eucalyptus grandis
gagaaaccttatgggggaagatttggggaccttgaactcgaaggagctcgagcagctcgaacgtcaacttgaggcatcattgaagcatattaggtcaactaagactcagtgcatgctcgatca

SEQ ID NO: 2010 - DNA, 581 bp, Eucalyptus grandis
cttagggctagcttgcttacatcttcaccatcttctgcgtagtttcaacattttagagttgaagaaaaggagaaaaaactaggcaaacttgcgaccatggtttttccaacccaagccacgcccgaggagtccccgcagaggaaaatggggaggggaaagatcgagatcaagcggatcgagaacacgacgaatcggcaagtgactttctgcaagcggcggaatggcctcctcaagaaggcatatgaactctccgttctttgcgaagccgaggtcgccctcatcgtcttctccagccgcggccgcctctatgagtatgccaacgatagtgtcaaagcaaccatcgagaggtacaagaaggcttgctcagattcctccagtagcggatccgtttctgaagctaatgttcagttttatcagcaagaatccgccaagttgcaacaacagattaataacatgcagaacaataacaggcaactggtgggtgactcaattgctgggatgaatatgaaggatatgaagactacggagcaaaaactagaaaaagcaatcgctaaaattcgcgccaaaaagaatgcgatttt

SEQ ID NO: 2011 - DNA, 538 bp, Eucalyptus grandis
tcagcacaaggaacaaatgctggttgaagctaacagagaattaaggaagaagctggaagagagcaatacaagaatccctctccgccttggatgggaagctgaggatcacaataacatttcatacagccgccttcccatgcagtcgcaaggattgatcttccagcccttaggcggcaacccgacattgcagatcgggtacaatcctgcaggctcgaatgaattgaatgtttcggctgccgaccaacatcccaacggattcattcccggatggatgctctgaatcgttccgcaagtgaactgcttgctggaagttccatatcaagtacattttccagtttttgctatgatatatgactcttcttcttctggatgacctatacgaagatccatcattcgtggatattgtccatggacgtaccctaaaaggaaggacagtatgaatccaatctagcttactattttgtataagaataaacatctgtgctgctgatatttggaattcatctatgttatttaatgaaaaaaaaaaaaaaaaaaa

SEQ ID NO: 2012 - DNA, 341 bp, Eucalyptus grandis
aggcagcaaagagctcgagtccttggaaagacagctagatgggtcattgaagcagatcagatcacgaagaactcagtacatgttagataagctgactgatcttcaacatcgggaacagttgctccacgaagcaaacaggaccttgaatcaacggttgatggaaggataccaagtgaatgcgctccagttaaatcaacatgccgaggaagtcggaggatacggtcatccaccgccgccgccactgccgccacagccacttgctcagcctcacagcgaagcttttttcaatcccttggaatgtgaacccactttgcaaatgggataccagcccgatccagtgt

SEQ ID NO: 2013 - DNA, 934 bp, Eucalyptus grandis
gcgccatgacgcggcgatgctcccactgctgcaacaagggccacaactccaggacctgccccgtccgcggcggcggcggggacggcgggggcgcggcggccgccccctcctcctcctccccctccacctcctcctctggcgccgcggcggcggcggcggcctcggcctccggcggcggggtgaagctgttcggggttaggttaacggacgggtcgatcatgaagaagagcgccagcgtggggtgcctgtccgccgcccactaccactcctcgtcctccgccgcggcatccccgaaccccggctcgtccccgatcgacgggagcgacggctacctgtccgacgatcccgcgcccggctcccgctcgtccaatcggcgcgtcgagaggaagaaaggtaacccatggacggaggaagagcatcgaaggtttttaattggtctccagaaattgggtaaaggagactggcgagggatagctcgtgactttgtgactacaaggactcctactcaagtggcaagccatgcccagaagtattatatccggcagagtaatgctggccgaagaaagaggcgctccagcctttttgacatggctccagatatggctactgctgaccaaccctcacatccagaagaaacatttctgcctcctttggtcagacttaacgatgatactaactcaacaacttcaaccagtatgggactcgatttggaaagaacgcctatggagacctcgcacccagaaacatctgaagggggcggtgatgttgcgatggaatcaattgatcaagtacctcttgtaccctgttacttcccatactatttaccactaccctttcccatgtggccgcccaacatggcgcctcctgaagatggaagggtggtggagacatctcatcaccgtgtgctaaagccaatcccagtaattccaaaaga

SEQ ID NO: 2014 - DNA, 372 bp, Eucalyptus grandis
ctgggacacttcttcttcccctcctactttacttgaatcggtcgacaattttatcctgtctccagctagaactggaaaggctgaatcagagtgtctttctccccgtaatagtgggctgctggatgctttagttcacgagtcgaagactatgagcagtgccaaaaataattcacctgaaaaaagtacaaattcatctgctctgacacctggtgatataagcagttccactttggatatttgcaagtctgaatgggaagagtatggtgaccccatttctccaccgggccattctgcaacttcagttttcaatggttgtactcctttgagcactagtggaagctcactggatgaacaaccgtatcccgatacctt

SEQ ID NO: 2015 - DNA, 411 bp, Eucalyptus grandis
gcacataagaaggaagctcttgaaccgagggatcgatccggcgacgcaccggccattgaatgagcccgcccaagacgcaaccactatttcgttcgcagcggctccgtcaaaacaagaaccgcgagacgacgccatcgccgccgcgctcggctacaagaacgagaacaacccgacaacaacggcagcaacggttcaagaaaagtgtcccgacttaaatcttgagctcagaataagccctccttgccagcagcagcatcagcctgatgcgtcgatgggaatggttgagggaaatcactgctttgcctgcagcctggggttgcagaacagcaaggagtgcagttgcaggagaggagcgagcgggggaagcagcgcccatggcggctacgactttttggggttgaagacgagccg

SEQ ID NO: 2016 - DNA, 356 bp, Eucalyptus grandis
ctcgtccccaaggtttttttgcggaagtatggagttcccgagtgaattttcagaggcctcttcacagaagagaatcggggggagagggaaaatagagatcaaacggatcgagaacacgacgaaccggcaggtcaccttttgtaaacgccggaacgggttgttgaagaaggcttatgagctatcggtgttgtgcgatgctgaagtggcgcttattgtcttctcgagccgtggcaggctctatgaatatgctaacaacagtgtcagaggaacaattgagaggtacaagaaagcaagcagtgattcctccacatcccacagtccgtttcctgaagtggaacactccagttttatccagc

SEQ ID NO: 2017 - DNA, 356 bp, Eucalyptus grandis
agagagtaatggggagagggagagtggagctgaagaggatagagaacaagatcaacaggcaggtgaccttctcaaagaggaggaatgggctgttgaagaaggcctatgagctctctgtgctgtgtgatgttgaggtcgcgctcctcatcttctccagccgtggcaagctctatgagtttggcagcgctggcccttctggcataaataagacgcttgaacgataccaacgtgacaacttcactcctcaagacaacgttgctgaacatgagacacaacagaactggtttcaagagatatcaaaattgaaggcaaaatatgaactcttcaacaaactccagaagcatttgcttggaaaa

SEQ ID NO: 2018 - DNA, 495 bp, Eucalyptus grandis
caaggaagcaacagtcttgctgcaaccagaagctagttcaaactagtggaaggttgtgggcgcttccagtgctttgtaaagccaccccaagaaagcaaaaaccatcgttgccctaccacaaagttcgcagcgttcgtcgacgagaggagtctgttgatttatccaagtgttgtttaaagtagatctcctttttcggtgaacatggctcgtggaaaagttcagatgaagcggatcgagaacccggtgcaccggcaggtcaccttctgcaagcgccgcgcggggctcctcaaaaaggccaaggagctctccgttctctgtgacgctgacatcggcctcttcattttctccccccacggcaagctctatgagctggccaccaaaggaaccatgaaggggctgatcgagaggtacatgaagaccacccaaagccaagctgctctgaccgaggaagccacaccgagccaaccactggatgccaaagaagagattaacata

SEQ ID NO: 2019 - DNA, 613 bp, Eucalyptus grandis
agaaagagagacagagatatgggaagagggaaagtagagctgaagaggatagagaacaaaatcaacaggcaagtaacatttgcgaagagaagaaatgggcttctcaagaaagcttatgagctctctgttctctgtgatgctgaggttgcgctcatcattttctccaaccgtggcaagctctatgaattctgcagcagttctagcatgatgaaaacaattgagaagtaccagaagtgcagctatggttcacttgagaccaactgctccatcaatgagatgcagaacagctaccaggattatttgaagctaaaaacaagagtggaggtcctccaacgatctcagagaaacctccttggggaagagttgggtcccctaaactcgaaggagctggagcaacttgagcaccagttggagaattctctgaagcaaattcggtctgcaaagacccaattcatgtttgatcaactggctcatcttcagcacaaggaacaaatgctggttgaagctaacagagaattaaggaagaagctggaagagagcaatacaagaatccctctccgccttggatgggaagctgaggatcacaataacatttcatacagccgccttcccc

SEQ ID NO: 2020 - DNA, 564 bp, Eucalyptus grandis
atccccttgccttgttcaactctctctttctccccctccttctactgcgaatatcatatccgaagctttggcttcgacgacgaggctcacggaaattagagaaccatgaggaagccttgctgcgacaagcgggacaccaacaagggggcgtggtccaagcaagaggaccagaagctcatcgattacattcaaaagcacggcgagggtagctggcgaactcttcctcaagccgccggtctgctccgttgcggcaagagttgccggctgagatggataaactatctgaggccggacctcaagagaggcaacttcgcagaggatgaggaagatctcatcatcaaacttcatgcactcctcggcaaccggtggtcgcttatagctggaaggttgccgggacgtacagataacgaagtcaagaactattggaattctcacctaaggaggaaactcctaaagatggggattgaccccaacaatcaccggttgaaccaaaatctccctcgctctcaaacccggatgcctcggcagcacttcctcatccagtatgaagaccacatgaccctg

SEQ ID NO: 2021 - DNA, 410 bp, Eucalyptus grandis
tggaagctctgcagcaatctctcgtggacacactttcttcgaccacactgagtcctactggttcaggcaacgtcgcagaatacatgggccaaatggctattgcgatgggaaagttggccactctcgaaaacttcgttcaccaggctgacctcttgagacagcagacgctccaacagatgcatcggatattaaccacccgccaagcagcccgcgctcttctcgtcatcaatgactacatctcacgtctccgagctctaagttcattatggttagctcgtcctaggactgaaaacatctgttctgctaaactcttctgatgtaatcgatagttttgattgaaattaacgtttctagtggggatccatttactgcgactgtagcgattcgggccacatttatataaaagctat

SEQ ID NO: 2022 - DNA, 328 bp, Eucalyptus grandis
cgacccgttgatgaagccctggcagatcccatgtccgatacaacccataatagcgtccgcagacctgtttgagtgctgatgtatcgattgctgttgcaaatgtggaactagcgctttggattttagtctctttacctctgtgtttgatgtgaatattgtccgatgtctctgatgttcttacttcatcttgttggcagtggtaaaatgtcagtttcgtgtctgttgactggattggctctcttttttgtacaagggggtgtcgtttttcaccctcattagcttgtgaaatttgcatgatgatgaatggttgtaacaaacctatattagc

SEQ ID NO: 2023 - DNA, 380 bp, Eucalyptus grandis
ccaacaagtcatatatcctcgacttgctcccagtggaacgccttccattacttaatcgctgctagcgctaaacccccctcactcttcaccagcaaaaacgccttttctcgcacacaaatgggtcgtcgtaaaattgaaatacagccaataacgcacgagcgaaaccgatctgtcacattcctcaagcgcaagaacgggctgttcaagaaagcgtatgagctcggtgtgctctgctctgtcgacgtcgctgttatcatctttgaggatcgcccagggcacagccccaagctctaccagtactcgtctcgcggtatccaggatattgtgcagaggcatcttcatcacgacggcgagactgataaccgtggccctggggactt

SEQ ID NO: 2024 - DNA, 322 bp, Eucalyptus grandis
cgagacagaaccttcttggtggggcttgagaagcttgggaagggtgattggagaggcatctctaggagctatgtgaccacaagaacaccggcccaggttgcaagtcatgctcagaaatatttcctccggcaagtgagcttcaacaagaaaaagcggcgctcgagcctctttgacatggtaaaaaatcagtgctcctataaactattaccatcatatcggctatcatcaattagtttgatggggtttgataaattcttattgtataaggttgatgtcaaaaccgcggcgggtgatcgtttaggcagtttgacggccaagccga

SEQ ID NO: 2025 - DNA, 387 bp, Eucalyptus grandis
gaaagaagggagtagagaaggaggtgacataaatttgccacagaggcaacggactttgggagagatgacattggaggagttcctagtgagagccggcgttgtgagggaggacacacaaatgatggcaaggcctggcgacaatggagttcatgaagaaatgtcacaattcactagtaatggtctcgccagtagtgcggctgctggaaacgatttcatattctctagtaagcctgctggttcatcgttagattttattggaactagacctactcagctacagcaacaaccacagccacagccgcttgaaccaccggctccgctttttccaaagccggaaactgtgtcatttgcaacctccgtgcatctaccaaatacagcttcatatag

SEQ ID NO: 2026 - DNA, 450 bp, Eucalyptus grandis
gcgaatgctcctctccggattgccatgaactccaacgcttcctccaacccccagtcgatggccacctccacgacgtcggcgaccacgccggcggcgggcggcgacggcggcaagaaggtcaggaagccctacacgatcaccaagtccagggagagctggaccgaggaggagcacgacaagttcctcgaggccctccagctgtttgaccgcgattggaagaaaattgaggattttgtgggctcaaagactgtcattcagatccgaagccatgcccagaaatacttcttgaaagtccaaaagaatggggcagttgcacatgttccacctcctcgtcctaaacgcaaagctgctcatccctaccctcaaaaggcatcgaaaaatgttttagtgccgctgcaagcatccatggcccagccttcttcaacaaatcctgcttttacaattacacct

SEQ ID NO: 2027 - DNA, 786 bp, Eucalyptus grandis
ccaaacatccatccgtccatcagctctaaactttaattgtaatcacatcgtcctttctcgacaccaactgggtcaaatgcttaaaaaaaggaaaaggaaaagagaaagatgacgtttccttccttcctctccaccaccgctctcttctatttatctcctctctctctttcttcctccatgagcggtgctcttcaggttggatgcaccacttcaactcaacctcaatacataaacgtcgtgttgggaaaaggataaaggcagggagaaggagatggggaggtcaccgtgttgcgagagcgagcacatgaacaaaggggcatggagcaaggaggaggacgagcgcctcatcgcctacatcaagcgccacggcgaaggctgctggcgatcccttccaaaagcagccggcctgctgcgctgcggcaagagctgtcgcttgaggtggatcaactacttgaggccagatttgaagcgtggtaacttctccgacgaagaagacgagctcattatcaccctccacagcctcctcggcaacaagtggtcgctgatagcggcacggttgccgggaaggacagacaacgagattaagaactactggaacacccacatcaagagaaagcttcacgcacgcgggatcgatccccaaacccaccgtcctcttcgactacaccagcactgctggtgctggtgctgctgccacttcacactatctgttctaacgctaacaacagcggcaacaaggccacgcctcactcgacgacttgtgaagaattatcatcatcatcaaca

SEQ ID NO: 2028 - DNA, 476 bp, Eucalyptus grandis
agaagcgctgagttcttggtcaaagtctagcagtttcgggttctccatcaatcgagtcggagtgggagaaaatgagcacaaatggtttgctgaagtttgaccaaagtctttagtgagatggttgctgtctcccgttctcctccaaacagatgtctgatcaaataacttacttgaccgccagtatgaactctcctttagcccagcttgttaacccaagaaggatgcacacctacgagccatttgaccagttccccatgtggggagacaccttcaaagctgacaaggtcaaaaatctcgaggcatcgtcatctgtgatcgtgcatgcagtagatgatggattggacaagaagtttgaatatgtttctcatgaatcggcagaaaattccagctccaggagcgatcaagaagcaaatagacctgacaaggtacagagacgtctagcacagaaccgtgaagctgctcgaaaaagccgtctg

SEQ ID NO: 2029 - DNA, 535 bp, Eucalyptus grandis
cagccggatgtaccttagtgtactgaatagcctaaagccatgttcctatcagatgttaacttgcatatggaaatgaatattacaacatgcgcgctttcttgagttttttttccctctgtagttgcacgcgaagaagcgctgagttcttggtcaaagtctagcagtttccgggtctccatcaatcgagtcggagtgggaggtatgaactctcctttagcccagcttgttaacccaagaaggatgcacacctacgagccatttgaccagttccccatgtggggagacaccttcaaagctgacaaggttaaaaatcttgaggcatcgtcatctgtgattgtgcatgcagtagatgatggattggacaagaagtttgaatatgtttctcatgaatcggcagaaaattccagctccaggagcgatcaagaagcaaatagacctgacaaggtacagagacgtctagcacagaaccgtgaagctgctcgaaaaagccgtctgcggaagaagaaatatgtacaacaactagaatcaagccgct

SEQ ID NO: 2030 - DNA, 723 bp, Eucalyptus grandis
gtgaggcgctgcctccaccaccaccgccgtccccaccgccgccgccgccaccaccaccaccaccaccaccaccaccttatactgtacaaataatcccttggcctcggccgttatagcctcttactcaaaaatcagtttttacccttttctgttgcgtagtcgtagttttgggccaggggttctattcggtatatgtagagaagtcagtgggcgaaaccgagcgtcgagcggtcggccatggcttcctcttcttctgtagcttccgcgaggaaggacgcggatcggatcaaggggccgtggagccccgaggaggacgaggcgctgcagaggctggtccagagctacggcccccgcaactggtccctgatcagcaagtccatcccggggcggtccggcaagtcgtgccggctccggtggtgcaaccagctctcgccccaggtggagcaccgccccttcaccccggaggaggacgaggccatcgtccgcgcccacgccaggttcggcaacaagtgggccaccatcgctcgcctcctcaacggccgcaccgacaacgccgtcaagaaccactggaactccaccctcaagcggaagtgctcctccacgtgctcggccggcggcgacgacgccgacgccctcgcggagcagcagccgctcaagcggtcggccagcctcgggacgcccacgggcggcaacaacgccgtctccgatctgttcttcagcccg

SEQ ID NO: 2031 - DNA, 412 bp, Eucalyptus grandis
gctctctctctctctctctctctctctctctctctctgtggtggctttcttctgtttttggctgtgatcagacaaacaaaaaccatctggttcggcgtctgaacaagaaaaaatttgagaagggattcaaggaagatggcgaaagagaagataaagataaagaagatagacaacttgacggcgaggcaggtgacattctcgaagaggagaagagggctgatcaagaaggccgaggagctctccgttctgtgtgatgctgacgtgtccctcatcgtcttctcagccactggcaagctctatgatttctccagctccaggcagatgaagggagaggatctggaggggttaaacgtggaggaattggaccaattagagaagaaactcgaggcgggactgagcctcgtgatcaaga

SEQ ID NO: 2032 - DNA, 495 bp, Eucalyptus grandis
gagttaccaccacccctttgttttattttcgatcctgcatctctcaaaatgaggaaacctgatgcctctgggaagaacagctccaacagcaacgctaacaagctgagaaaaggactctggtcgcctgaagaggacgacaagttgatgaactacatgctcaacaatggccaaggctgctggagcgatgtggcccggaacgccgggctgcagcggtgtggcaagagttgccgcctccggtggatcaactacttgcggcccgacctcaagaggggcgctttctccccacaagaggaggagctgatcatccacttgcattccatccttggcaacaggtggtcgcaaatcgcggctcggttgccgggacggactgacaacgaaataaagaacttttggaactcgaccataaagaagaggtcaagaactcgtcatcatcttcttgtagacactcggcaaacacgagcgattctccttgtcatcagacgttaaagatgtatg

SEQ ID NO: 2033 - DNA, 220 bp, Eucalyptus grandis
gcccccgagatcgcgccgccgctcgcggcccctcgcggcgggcaccaccggcgggcgcactccgaggtcaatttccggatcccggaggacctggatctggggccggatccgttcgagaacgggccctccgggagcttcgaggacttcggatcggaggatgatctactcagcacctacatggacatcgagaaattcggatcaagctcgacgcgggcagggg

SEQ ID NO: 2034 - DNA, 445 bp, Eucalyptus grandis
cttctgagaatgtgtccggtggagccatcgaacgtcccagagccacgggaaaattggctgcgcctgtaaactcgcccagcatgtcctcatcattggacctgaagaattcttgcatggatgcaaatgccaaccctgtgagcattttgcaacctggtgtagtgccacctgaagcctggttacaggtaatgtcactctgtggtaggttacttaaaatatttccctggaaggccagtacttctgttctttctgctgtttcttcaagttgctctctacaatatcatcgactttgtttctcaaaattcgctttgtgtaagaatgaaagagaactgaaaagggagaggaggaaacagtcgaaccgtgaatctgctagaagatcaagactgaggaagcaggctgagactgaagaacttggcaaaaaggtggattctctgagtgccgagaatag

SEQ ID NO: 2035 - DNA, 349 bp, Eucalyptus grandis
ttttttttttgtatataatctctttatttctagttagggaaaattcagaaagaagccgtgaaggaacttcatccaatggcgatggaaaatctgaagtgcaaggaaaggttgctggggaggtggatgctgcttctgagaatgtgtccggtggagccatcgaacgtcccagagccacaggaaaattggctgcgcctgtaaactcgcccagcatggcctcatcattggacctgaagaattcttgcatggatgcaaatgccaaccctgtgagcattttgcaacctggtgtagtgccacctgaagcctggttacagaatgaaagagaactgaaaagggagaggagggaacagtc

SEQ ID NO: 2036 - DNA, 648 bp, Eucalyptus grandis
gagagagagaaagccagagagagaaagaggaggattttggatgaacgtatattcattgggaggtgctagtcatggggaggcaaccgtgctgtgacaaatccggggtgaagaaaggaccgtggacggcggaggaggacaagaagctcatcaacttcatcctcaccaacggccactgctgctggcgtgccgtccctaagcttgccggcctccgccgctgcggcaagagctgccgcctccgctggaccaactacctccgccccgacctcaaacgcggcctcctcagtgaggctgaggagcagctcgtcatcgacctccatgcccgcctcggcaacaggtggtcgaagatcgcggcaaggttgcccgggagaaccgacaacgaaataaagaaccattggaacacccacatcaagaagaagctgctcaagatggggatcgatcccgtgacccacgagcccttgaacaagcctcagaaaactccatccgaacacgacccggaagcttctctgtcgtcatcgcaagcggaccctacgtccgaatcgcccgccaacacgcaccaacccaacaacgcccacgcggacgaagtacaactcgtcctcgtcctccccgtcggcctgtccgccgagaactgttgctccggcagggacgagt

SEQ ID NO: 2037 - DNA, 268 bp, Pinus radiata
ctgagcagaaatatggatgacgtatttgttcagcgctgcaacagaaactttacagctcgagatcggctaatctctaaagagagaaggaatttcgggtgggtttgtggcgttactgaagaggaagaagaacttattatcagaatgtataagctcgtgggcaacaggtggtcattgattgctgggcgccttcctggtcgaaaagctgaagagattgagagatattggaagatgagaagcataaatgctgcacctctgaagcctaatacct

SEQ ID NO: 2038 - DNA, 1055 bp, Pinus radiata
ggcgaatcgagctccagtctctgcccttaggcacacgtacaacatacgtggctaacagagataacacccaaagcctatccagccatggtcgatggatggttggacagtgatacaggcaggagagggttcagctggaccacagttttggatagaatggttgcttttgcctcctcggctcttactaatcttctgactttggcagtatgtcttccgtgatatatttaatgtgtatacgttcttttggggattgcgagacagcagatccaagtctgggctgtggatctggaacgcattttaagctctggtctcttcaattgggtttctggtagcgagctccatcacaatggtcaaagaattgttgatgatgtgttccaactgtgggcacagtgggcacagctccagagcctgtcctgatagaggatctgtcaaattgtttggggtcaggctcattgctacagacgatggcatggcctgcatgagaaagagcctcagtatgggcaatctcggtcattaccgttcactttacaatgtcaatcactgttctgggacaagcgaatgtggatctgcagatcaggatgggtatttgtctgatggatttgttcattcttccagcaatgcacgcgagaggaaaaaaggcgtcccatggtcggaggaagagcacaggatgttcttgtatggactggaaaagcttgggaagggtgactggagagggatatccaggaattttgtgacgaccagaacacccacacaagtagccagccatgcccagaagtattttctaaggcagagcaatcttaataaaaggaaacgtcgatccagtctctttgatatgtgtcctcatgattcccatgtcacaagctcttttcgcagagaagactcattgggaaacctttatgaattttcgccaaaacattcggctttgggggtatcgcctaatttcgaactatattcatttggtgtttctccaactttatctctaggaagatccctgcaaccagtggaagcagttcttgaagagaaagcagcccattatcatcctgtgaactcagaagaag

SEQ ID NO: 2039 - DNA, 167 bp, Pinus radiata
tggttacagctctgtagcggaatagatgaacatgcagctggattctgttctcaacttgtgtttgcaccaattgatgcatcttttgctgatgatgctcctctggctccctctggtttccgagtaattcctctagaatcgggatcagaatgtttctcctccaaaacgga

SEQ ID NO: 2040 - DNA, 357 bp, Pinus radiata; identical to SEQ ID NO: 360

SEQ ID NO: 2041 - DNA, 438 bp, Pinus radiata
ccgaagcaagatcagaaactcgttacttacatacaggagcatggccatggcagctggagggctctgccgcagaaagctgggttgctgagatgcgggaaaagctgcagattgcgttgggctaactatctaaggccagatatcaagcgggggaagttcactgtgcaggaagagcagactattattcaacttcatgcactacttggaaacaggtggtccgccattgctactcaccttcccaagcgaaccgacaacgaaatcaaaaactactggaatacccacctgaagaagcgcttgctgcagatgggaatcgaccccgtgacgcacaagcccaagtccgaatcgattatggtacctggtgttcagtcgtccaatgggtcctcgaatctgagccatatggcgcagtgggagagcgcgcgcctggaagccgaatcgaaggct

SEQ ID NO: 2042 - DNA, 319 bp, Pinus radiata
ggaattttcattggaggaagttgtgttggtggggatcaaagtcattcaatgagtggaaatggagccctagcatttgatatggagtatgctcgttggttggatgagcatcatcgacagataaatgaactgaggtcagcagtgaactcacatgtgggggacaatgagctgcgtggtctggttgaaggtgtcatgggacattacgatgaaatttttcgtctgaagactgtagcttcaaaagctgatgtctttcatctggtctctggcatgtggaagacgcctgcagaaagatgcttcatgtggatgggaggattccgtcctt

SEQ ID NO: 2043 - DNA, 404 bp, Pinus radiata
aaccggagagcaagaacaaagtggaaacgcaacgaagtggagtgcgataatctgaaacggtgttgcgagagtctgagggaggagaacagaagattggagaaagaagtgcagtcgctgagagccatgaaagtcccgcagtcacccaattcgatgcctctggcagccgccaccctcgcaatgtgtccggcctgcgagggccttgcaatcaagaaccgcggcgccgccacttcctccaccgcgaagtcacaacaatccctccttacaattatggggattggggatgtaaatatgatatccaaaaataaccaaaccccttcaatgggaatgggagatgaaatgaattgaagaaagtgaacttaaaaaaaaaaaaaaaaaaactcgagactagttctctctctctcttc

SEQ ID NO: 2044 - DNA, 379 bp, Pinus radiata
ctggaacctgatagaagagaagattgaaggaagatcaggaaagagctgcaggcttcggtggtttaatcagttggacccaagaatcaaccgaaggcctttcactgaagaagatgaggagaagctactggcagcccatcgtttatatgggaataaatgggccatgattgctcgcttatttcctgggagaactgataacgctgtgaagaaccactggcatgttatcatggccaggagatacagagagcaatccagtgcttttgggagaaggaaattgcctcaagttcatagaagagagaaacgtgcctgcactgatgatgaaacgaggatgggcagcagcagctgcaacatgtgggtggataaatatagctctctcaaatct

SEQ ID NO: 2045 - DNA, 369 bp, Pinus radiata
ctcattgcttacattcgagccaacggcgaaggcagctggcgttcccttcccaaggctgcagggctgccgagatgcggaaagagctgtaggctaagatggataaactacctgcgtcccgatctcaagcgtggaagcttcacagaagaagaagacgaactcatcatcaaactccactccgtcgtcggcaacaagtggtctcttattgcaggaagattgccggggcggacggacaacgagataaagaactactggaacactcacatcaagagaaaattgctgatcaagggaatcgacccccagtcccatcgtcctctcgggcagccctacagcagcaacaatatgcccgtctctcggctatttctgacctcg

SEQ ID NO: 2046 - DNA, 530 bp, Pinus radiata; identical to SEQ ID NO: 335

SEQ ID NO: 2047 - DNA, 358 bp, Pinus radiata
gctctaccagtgtcaagccttgtttgaaaatggcgcagtcgaaaaactctcaagaacctataatgatctatatgatgatttaaaagaagaaatactgtcgtggctgccagtggaatgtgtgtgcagatttcgcagcgtctcaaagcagtggaataatctcctgtcatcacacaatttcataaaaaaggtatggagaaagaagcctgctaacatgaacccatggctcgttctgcatcctgtcaactcctcctattgtttggcatactgcttcttcacaagaacctggaagactacctcctctatctccattgaaaatgccaataattatggagaaaacggaatcttggggatcagctgc

SEQ ID NO: 2048 - DNA, 376 bp, Pinus radiata
aagacaagaagctcattaatttcctgactactcatggccaatgctgctggcgcaccgttccagagcttgccgggatttcaagatgcggaaagagttgcaggctgagatggacgaattatcttcgccccgatttgaaacgaggagtcttctcagagtccgaggagaaacttattttagatcttcattcgcgtgttggtaacagatggtcgaagattgcctcgtttctgcctgggcgaaccgataacgagctaaagaactactggaacacccacatcaagaagaagctgaagcgcatgggactcgaccccggcgacgcacaggctatttcagaaacactaccacagccagcccctgtagctgagaataatgatgtccc

SEQ ID NO: 2049 - DNA, 656 bp, Pinus radiata
caaacaatcatcacgagatgaaattcccttcagaatgggatttctgagattcgatccttgatctgttgctgcgatctgatcacattttattgggggtttagggtttaagttttctctgctaatggcatcgatgaaaggaaaatctccgggtcacgatgagcccgatcggatcaaggggccttggagccccgaggaggacgcagcgctgcagcatttcgttcagaaatacgggccacgcaactggtcactgatcagcaaagcgattcccggccgatctggcaagtcctgcaggcttcgatggtgcaaccagctgagcccccaagtcgagcaccgccccttcactcctgaagaggacgccactatcgtgagagcccacgcccagcacggcaacaaatgggccacgattgcgcgcatgctcagcggcagaaccgacaacgctatcaagaaccactggaactccactctcaggaggcgttgccaaggtgggggcgccctcgtcatcgacgacgagatctccagcggcgccgacgggtttcgaaaacggaacctcagcgaagacgccgatgccagccggaaattcaagaagctcagcctcgggacgacgacaacgaccacgaccacggagcctagcacctcctcggcctcggatcggagcg

SEQ ID NO: 2050 - DNA, 466 bp, Pinus radiata
atggggaagacgaagatggagatgaaacacattcaaaaccctagccgccgccaagttactttctcgaaacgcaagaacggattgctaaaaaaggcattcgagctttctgttctctgcgatgctgaagtcgcccttatcattttctcggaaactggcaagatcagcgagtttgcaagccacaacgacatggcaacaatactggaaaaatatcgcatatacacgcaaacagaaacagatggaaacatgggggcttcgtcggtccaaagcgtgaagggatggtttcctaattttctcgagattgcgggattcagtgtttgtggatgatccctattattgcagtgtgggttggggcacgaggggtgcagttgactcgactcatatgattggaaggttggtgaatcacaattgaaagcgttgcacgagaggatggacaatttgaaaaaacaggaacgaaacatggttggtg

SEQ ID NO: 2051 - DNA, 390 bp, Pinus radiata
gtttgaagtagaatttacctatcaattgcgttaaagatactctgttttcggccctgaaccctaccaggggaacgcggcgccatgtcttcgaggagctgttcgttgtgcggccttaatggccacaattcccgtacctgtgtgggaagtggtgtgatgctctttggggttcgtctgacggatggaccaatgagaaagagtgctagtatgaataatttgtcaaacttatctcaatatgagcactcggatccggctgaggttgccgctgaaggttttgatggttacgtctcggatgacctcgttcattcatccagcaatgcccgtgagaggaagaggggagtgccctggacagaggaagaacaccggatgtttcttgtcggccttcagagagtc

SEQ ID NO: 2052 - DNA, 312 bp, Pinus radiata
gtttgaaggggaacgcggcgccatgtcttcgaggagctgttcgttgtgcggccttaatggccacaattcccgtacctgtgtgggaagtggtgtgatgctctttggggttcgtctgacggatggaccaatgagaaagagtgctagtatgaataatttgtcaaacttatctcaatatgagcactcggatccggctgaggttgccgctgaaggttttgatggttacgtctcggatgacctcgttcattcatccagcaatgcccgtgagaggaagaggggagtgccctggacagaggaagaacaccggatgtttct

SEQ ID NO: 2053 - DNA, 393 bp, Pinus radiata
cgaggtcgagtccagctgaggaggatcgaaaacaaaatcagtcgtcaagtaactttttctaagagacggaacggactgatgaaaaaggcggcggagctgtcaatactgtgcgacgctgaagtggccttaatcgtcttctccaacaaagacaaactgtacgagttcgccagttccagtatgaccaagattttggaaagatatcggaagcgttcaaatttaatacaagatatcggtaaagatccacagaattcagacattgagttgacgcgtctaaaagaagaggttgaccgcttacaaagatccagaaggcatcttttgggtgaagaccttcatcaactaggtgctacggatctgcaacacttagaacaacagcttgaagaagcgttacaaaag

SEQ ID NO: 2054 - DNA, 210 bp, Pinus radiata
cacagttctggaacctgttaaagagaaatcagtcgaggtcaaactccttctgtttgcacgaggatgcccagcattatggagaagcaaaatagtggtgaagatagtgatagcaagggtcagcttgataatggcaagtatgtccgttacaccaatgagcaggtggagactttagaacgtgcttataatgaatgctcaaagcccagcacaagg

SEQ ID NO: 2055 - DNA, 385 bp, Pinus radiata; identical to SEQ ID NO: 389

SEQ ID NO: 2056 - DNA, 545 bp, Pinus radiata
tgaagaccttgatgattgtatccatccaccggagaagaagagaaggctgactgctgaccaagtgcagttcctggaacgaagctttgagatcgaaaacaagttggaacctgagcgcaagatacagctagccaaggagttgggcctccaacctaggcaagttgcagtctggtttcaaaaccggcgggcaaggtggaaaacaaagcagttggaaagggattatgatattctgaaatcacgctatgagaatttgagagttgattatgatagcctgctcaaagaaaaggataaattaagggctgaggttaccttcctaacagacaagctacacgacagtgaccatgaagccctcacaaaggattctgagtctgctgacaagaaagtctatccccagcctgcctcccactctgactgtgttggggagcctgaaagaagtactgctgccaaggatacaccaccaggttgtaaacacgaagatcttctgagctctggaacagatagcagtggggtcctggatgaagatagtcctcaccatgttgactgtggtc

SEQ ID NO: 2057 - DNA, 385 bp, Pinus radiata
aaacttgctcacggattccgacccttccggctaaagctgctgcatttctgtgtgtattgaagatggggagatctccctgctgtgaaaaagctcatacaaacaaaggggcgtggaccaaagaagaggacgatcgcctcatcgcccacattcgaactcacggcgaaggttgctggcgctcgcttcccaaggccgcagggctgatgcgctgcgggaagagctgcaggctccgatggataaactacctgcgtcctgatctgaagcgtggaaacttctcagaagaagaagacgaactcgtcatcaaactccactccctactcggcaacaagtggtctcttattgcaggcagattgcccgggcggacggacaacgagataaagaactactg

SEQ ID NO: 2058 - DNA, 436 bp, Pinus radiata
aaagaagggtgttccctggactgaagaagagcacaggcagtttttgatgggccttcgcaagtacggcaaaggcgactggagaagtatttctagaaactttgttgtgtcaaggacaccaacccaagttgccagccatgctcaaaagtactacattcggcttggttcggataataaaaacaagagaagatccagcatacatgatatcaccactgttcatggtacagacaggatgccttctcctttactgcacgtttctaataggcagactaattccccctcaacacaggcagaaatgaatcattcaccatgtctggacatatccatctcagatttcacgaggacctctaataaactctttgggacctcaaatagatggtaaccttctattttcacctcactatcctctaaatctgtatacccagagagggtttggggg

SEQ ID NO: 2059 - DNA, 624 bp, Pinus radiata
tttttattcaaatgacagcacgacttcccttcctcagatgtttcccaggctgcactcatcagctgcagcaccacgcggttttggattctccctgttctttgttctgttgcgttaaagattggttgcaggtcgaatcgcccaggccgatttgaattctcctgaggattgacaagatgacgcgcaagtgctcgcactgtggcaacaacgggcataactccaggacgtgccctaaccgcggcggggtgaagctcttcggcgttcggcttaccgatggcccgatcagaaagagcgctagtatggggaatttgatgatgatgtccaaccctagctctcccgctgacccctccgagccggcctctgccgctgctgctgccgcggcggcggcggccagtggctatctctctgatggtcttgttgaagcctccacttcctccaattctcgcgagcggaagaaaggtgtgccatggacagaggaggaacatagaatgtttttgctaggtttgcagaagcttggcaaaggtgattggagaggaatagcacggaattttgtcataacacgaacacctacacaggtagccagccatgcacagaaatattttattcgacagagcaatatgactagaa

SEQ ID NO: 2060 - DNA, 364 bp, Pinus radiata
atcgaggaaaaccagaatcttctcattttcacttgctgtgggtttctctggactaacgatgaagatgtctctaccttctaatgttctcactctcagtgcggattccaattctaattccaattcgatctcctcgtcaggagacgaactcgccgcaaaggtgaggaagccatacacaatcacaaagcagagagagaggtggagtgaagatgagcatcttaagtttctggaagccctgaaaatgtatggccgagcatggaggcgaatcgaagagcacataggcacgaaaacagctgtccagatacgaagccatgctcagaagttcttctccaagttggtaaggggatcttcaaataaaggtgtgtct

SEQ ID NO: 2061 - DNA, 258 bp, Pinus radiata
gagggatagacatgaatcggggtccggctaccaatgagtctgagtattcgtcggttttccaggccgatgccttgcggacgattgacactggttccgtggtagtgaagcgagagcgagaaagaacctttgagttggaggcggagagggatcgaacctgcgacgtgagttccaggacaagcgacgaggaggagataggttcgacgaggaaaaagcttcggctttccaaggagcagtctgcactcctggaggaaagtttct

SEQ ID NO: 2062 - DNA, 347 bp, Pinus radiata
aacttggagtcactcacgttgaaagaattgcaacaactggaaaagcaattaggcagggctataaaaaagatttataataaaaagatgaaaataatttcacaatgttgcaaatcattatcagaaaaggtacgctctttggaagaggagaatagtgaacttcttaccaagttgattcctagagccgattcctccacttctggggctgcgttatttgttgatacatccatgccaaaatctcactcagcaaccgaagcatggcgacaactcctccagcgagtccttgtgacagcagcgaagatggcgacaactcctccagcgaggcacagtaattcccgaccgaaccacta

SEQ ID NO: 2063 - DNA, 267 bp, Pinus radiata
tggcaaggcaacatcgggatctgcaaatgaggccatgtcacaaagtggggacagtggcagtgacggttcaagcgaaggaagcgaggaatataacactcaaactgagtcacaagtggcgagaaagagaagttttgatcaaatgatagtagatggagccaatgctcagagtaccaatattcaatcatataattcccaggctggagaaccctatgtgacttccggcgggcatgcaatgggtaatcccattagtcaagctgttgctgcagt

SEQ ID NO: 2064 - DNA, 336 bp, Pinus radiata
tcaacttaaatggaaggaacggatcttaaccgaagagaacctttttcttcgtaaaaagtgtggtgatgaacatgtggattgttcggcttttagaacacctccagcacaacttagaagcatccagaacattgatgtggagactcaactggttataagacctccaactgtacaacagcaccctgacgtcgatagtcctcgataactgttgcatatgcaaattttctactttcatgaaataaacaaacagtacacctcattttgttcgccttttgtaaacgtataattactactgcatatgtaagctttcctctcaaaaaaaaaaaaaaaaaaaaaaac

SEQ ID NO: 2065 - DNA, 573 bp, Pinus radiata
cgcagatcgggactgcaaacagaaccatagttctgcaacattcaatgggacggactccttgttgtctgaaagtgggactcaatcgaggtccctggacacccgaggaggatctttgcctctcaaattacatcgaagctcacggagaaggcgggtggagaacacttccaaagaaagcaggtctgctccgatgcgggaagagttgcagattgcgttggatgaattatctccgacccgatgtgaaacacgggcacatattacccgaggaggaagatttaatactcaggttgcatcgtcttcttggaaacaggtggtctttgatcgctggacgtatgcccggcagaacggataatgaggtcaagaactattggaatacccacctcagcaaaaagcttatcagtcagggtatcgacccgcggacgcacaaaccgttgtcagaatccgaagacatatgttcgagtcccgggaatagcgaagtgagccgcaagtctcaacgggaaaataacgctgaaataccaagaaaagttgccgatggcgcagttgatattcaagataaggaagaggatatcacagaag

SEQ ID NO: 2066 - DNA, 407 bp, Pinus radiata; identical to SEQ ID NO: 333

SEQ ID NO: 2067 - DNA, 407 bp, Pinus radiata
atgctttgtggccggttcaaatatttgagctggcttagcttctctggttcagaaatggcggactaaagtaatagtgtgccccgaggtctggtgttcgaatctcgttggcgtgaaaggtcaaatttttctctcgagtttcattgattctgaaaaactggcatagctatggcgatgagcaatgggagattgtgtgaagatttggataggattaaggggccgtggagccccgaggaggacgcgtcgctgcagaggcttgttcagaaatacgggccgaggaactggaccctgataagtaaaggaatcccggggcgatccgggaaatcgtgcaggctacggtggtgcaatcagctgagccctcaggtggagcacagaccttttaccccgtccgaggatgctgctattctgca

SEQ ID NO: 2068 - DNA, 353 bp, Pinus radiata
attttttctgtagatggtgtgaggacgtgctgaatagttcctaaatcgtttcttccgcgtttggtcatcgaacgagttcctataactcgccaagaccaggttcttcacggactactaattttgggcttctacacatctttcccggaagtagatggggcgggcactaggaagaacagaaataaagaggatagaaaatgaagtgagcaggaatgtgagttttagaaagagacgacgtggattgctgaagaaggctgcggagttgtcaatactttgcgatgcaacagtgggcgttgttgttttctctccggccgggaaactttctgaatatgccagcacttcggagcaaatggata

SEQ ID NO: 2069 - DNA, 393 bp, Pinus radiata
attcgaaaccctaccaatcggcactcatccttctacaaacgcaagggcggtttgcttaaaaaagcatttgaacttgctgttctctgtgatgctgaagttgctctgataatcttctctgaaaccggcaggatttacgagtttgcaagccacgatgatgtgaccacagtattggcaaaataccgaatacaaacgaaaactgccggaaacgcaatgccttcatcgcttcaaaaaacagagtttgatcaattacaagtcaggatgttgcaggagaagatagacaatttggagaaaacgaaaaagcatatggtcggtgacaatttggagtcactgacgtggaaggaattgcaacaagtcgaaaagaaattaagcaaggctacaaaaataattgtggcc

SEQ ID NO: 2070 - DNA, 461 bp, Pinus radiata
cagcctgtggctcctgaaagcatcgtccctcctcatcagccgccgcacaaccaaacgccgaaccaatacatgcaaggatggtgggtttgatatttaacatttatcattatcagttacttcaatcacaacaaaagcccaaagcgtggtaaattacgaaattagaattatattatcattaaaaaaaaaccctattttcattgtatagcagtaggcttgatttactgctatgatagcggaggttttattgggcaaacaaaccctactggtatattagaccttcttgtcgacaaagtttaattgcataaatcttgtatgctaatctggccgctaaaagagcgatggaaaaatagttgtcccattcacaacacatgatatgtttaaatccaacgtgtatgtgtctgcaaaatattattatacactacggtttatcacatggtagtcgattcgccataaaaaaaaaa

SEQ ID NO: 2071 - DNA, 373 bp, Pinus radiata; identical to SEQ ID NO: 1982

SEQ ID NO: 2072 - DNA, 506 bp, Pinus radiata
ggactgcagaggaagacagaaaactggtgaattttatcaccctgcatggccatggatgctggcgcgaagtacccaaacttgctggtctgcttagatgtggcaagagttgtagattgcgttggacaaattacttgcgcccagatttgaagcgtggattattgtctgaatcagaggagaagctcatcattgatctacatgctgccatagggaataggtggtcacgaatcgctgcgcaattgccagggagaactgataacgagatcaagaattactggaacacgaggatcaagaagaaactgcgccagatgggaatcgatcctgtgactcacaagcctctcacccaaatgcaaatgcagagcacccctgcccagactctgctgctgcaagaaaatgatacagagcagcagcagcaggagcaacataatgagcctgatcctgatcagaatcagagcagcaatggcactgtggagacattggtctcgagggccagagaaccccacgaccac

SEQ ID NO: 2073 - DNA, 494 bp, Pinus radiata
attcagatggaacaacaacaatgtctacatatgaaagaaaagccagtcttcgagaattctatgctgttatatatccttccttgctgcaacttgaaggaggtataacagagatggaagataataagcagaaactgatttgcaaagaaagatacaagaaacgtgttgatgaagaaaggagacatctttctgagcttgatctggaacgtgaaaaagagtgtggaatatgtatggagactcagaccaaagttgtattgcctaactgcagtcatgcaatgtgtttgaattgctatcgggaatggcatgcacgatcagaatcatgccctttctgcagggatagcttgaaaagagtgaactcaacagacttgtggatttttacaagtaatgaagaagttgttgacatggaaacattgggcagagagaacttaaaaaggctatttaattacattgataaattgccacttatagtgccagagagcctgttttatgtttatgat

SEQ ID NO: 2074 - DNA, 1678 bp, Eucalyptus grandis
ctttttcttccctgtcctgtttctctgtgctcacatcttttaatatcacaccgaggctggaattctgccaggagccgcctctggtgctggctgacatttcacctagaagtcacaaaaactttgtagttaccattttcggaaagattttgaggaaacacgcgcagagggagagagagagagtggaagagagagaatctagtctctggatggggaggcattcttgctgttacaagcagaagctcagaaaaggcttatggtcacctgaagaggatgagaagcttctgaggcatatctctcagtatggccatggttgttggagctctgtcccaaagcaagccggtctacagagatgcggcaagagctgcagattgaggtggattaattacttgaggcccgatttgaaaagaggggcgttctcgcaagatgaagaggacctcattattgagctccacgctgctcttgggaacaagtggtcgcagattgcagcaaacttgcctggcagaactgacaatgagataaagaacctgtggaattcttgcctgaagaaaaagctcaggcagagaggcattgaccctgtgagccacaggcctctctctgaggttgagaatagtgacgacaaggacgcaacgtcagggcagacccaagataaggtctctcgtgggtcagttgaattgctgagccagctcaatccacaattctcaagctccacgacagcaaggagcagtaaaaacagcaatttgatggcaccaacattgagcaaggacacagttgcagatgggtttgtgagcaatcaccaagagaactcgatgatgaacagttgcatctcagactttgttgataatttctctctgcaacaattgaactactcatcaagtgattccagattttctaatctctgtttcacccaaacgggcagagcacatggaaacaccatcttttccgacttcaattcgaatgtaatatctgccatttctcctccctcatctaactctttattccctactgcttcaatgggcttcaacttcaagccatctaatgctgtcccctcggcgaattcgacttcaagcgctagcacaggaactgcagattttcacaacagtggctcctacttcgggaacagcttagtttcctggggattgttagcagattgtggctcgccagacaaggaggggtcgacttcgatccatccattggaagttcaccaacccggagacttcaagtgggctgccgaatatctccagaaccctctgttcatggcggccgcgctgcagaaccaagcccaggaacagtccaatttgtacaatcagataaagccagagacccagtttcctccagaccattcaactacttccatgtgggatcatctacagggacatgaatccttggacaattctttgaatacgtgcggcaaggatatccagagattaacggcgctactcggacacaattagatagaggattatattagctgatggagcctcagctgttgaagcaggaggggatcatttgattggtggcgacttgagaatttgcagattgttatttgttacaggtgtggactataattttttttttttaccccttttcctctttcaatgtacatagttctgatacaaaacatctgcatccccttgccttttacctatatttgctttaagaaaaaaaaaaaaaaaaaaaa

SEQ ID NO: 2075 - DNA, 636 bp, Eucalyptus grandis
aaacagagagagagagagatcatgagatacccagctccagctccagcttcaaggggcaagagcacgagcacggcaacgccatgctgcagcaaggtggggataaagagaggcccgtggacgccggaggaagacgaggtcctcgccagctacgtgaggagggaaggcgaggggcggtggcggaccctcccgaagcgtgctggcctccagcgctgcggcaagagctgccgcctccgctggatgaactacctccgcccctccgtcaagagaggccagatcgctcccgatgaggaggacctcatcctccgcctccaccgcctccttggaaacaggtggtctttgatagctggaagaatcccgggccgcaccgacaacgagatcaagaactactggaacacccacctcagcaaaaagctcatcagccaaggaattgatccccggactcacaagccattattgaaccataaccctagttcttcactagcagcccatttgcaagatacttataatgcttcaacattcacaccgaaagcaacttaccctaatcctacagtaccagtggaagaaaccggcgacgaaaatgatctgaaagtgggcagacagccagctgggtcagcctcaaaacgcgggcgttgccaa

SEQ ID NO: 2076 - DNA, 862 bp, Eucalyptus grandis
caaacgtctccgtttctctccaagctgaacatggacaagaagccagacgacgacagtggtaagtcccaagatgtcgaggtgagaaaagggccgtggacgatggaagaggatctcatcctcatcaactacatagcgaatcacggcgaaggcagttggaactccctagccaaagctgctggtctaaaacgtaccgggaagagttgtcggctccggtggctgaactatctgcgacccgacgtccggagaggcaacatcactactgaggagcagctcctgatcatggaactgcatgccaagtggggaaacaggtggtctaaaattgcaaagcatcttcccggaaggactgacaatgagataaagaacttctggaggactagaatccaaaagcacatcaagcaagcagaggctttctctggtcagagctccgagatgagtgatcaagcaagcacaagccacatgtccagcatgccagagccgatggagacctacgactcaccgccgtcattccaaggcaacaacaacatggagcctttgccggtgaatttgtcggtcgagtcaaatgaagcctactggagcatggacgatctttggtctatgcagttactcaatggggattgatcgcggggtgacgtatggtgcagtaatcgaaatggttcgtttacaataatagctaggtttgtttacataaaatggacattagcttttatctcacatatatatctacatacatgtgctagtttagaagttatctacaaatatgtgcatgagttgtaaacgaaactaccatctgcagtttgcatccccgctatgtaatgactgaaataatgaagcgagattatttggcttaaaaaaaaaaaaaaaa

SEQ ID NO: 2077 - DNA, 907 bp, Eucalyptus grandis
gagatggacaagaaaccgtgctaccgcacgcaggatcctcaagtgagaaaaggaccatggactcttgaagaggatctgattctgatggactacatagccaaccatggcgaaggtgtatggaactctctagctaaagctgctggtcttcaacgcaccggaaagagctgccggctgcgatggttgaattacctccgacccgatgtccggagaggtaatatcactcccgaagaacagctcttgatcatacacctgcaatccatgtggggaaacaggtggtccgaaatcgcgaagcatttgccggggaggaccgacaatgaaataaagaactactggaggaccaagatccaaaagcacataatcaagcaatcggaaactgagatcaacgatctcactattcctccatcatccgcaaacgcatgcacagatcatcgcggggtctcggccgcaaatacaatcgagatcgcctgttctccaccgtcggatcaaggcggctccggcgagactatgctctcggcccttcctcctgcccaagaaccgaacgacagcgcttgctggagcgtggaggatctctggcccatacagtcactaattagcggcatgggtgatgatgcccaatactattccgtttaggccttaattagattatagatcatgacctgatgaacaaaacaaaagcaattagaagacccaaagggctcatttattgggtctttatgttgaagctagctaggtagatcttgtatgtatagagaaaaggccacagcatatcatatttcctatgtgatgtgctgtatacactaccatagctttgtgctaggtatattagctagcttgtagcagtggcaacatatctatcgaaataagaacttagataatacagcttttggttaaaaaaaaaaaaaaaaaa

SEQ ID NO: 2078 - DNA, 658 bp, Eucalyptus grandis
gggagacgtctccagctcgagtcgtcatctgggtccgcgtcttctcttcccttcttccaatggtttgatcctaggacagagagagaaagagagagatataccgaaagagaggtacagagagatagagggagagggagagggagactcgtggcgctgtttcgagctttctagcttccggaggaggagggctggtgttgagcgaaacttggagaggtcatgaattcgacaaccactcagtttgtgtcctctagaaggatggggatgtatgacccgattcaccaaattggaatgtgggacgagaacttcaagcagaatggaaatcctaatgcgccgccagctctgatcatacctatgcacgcgaatttggacaaccagtcggaggatacttctcatggatcacaggatactgctggcaagtatgagcaagaaacatcgaaaccttatgataaggtgcaaagacgtcttgcccaaaaccgtgaggctgcgcgcaaaagccgtctgcggaaaaaggcttatgttcagcagctagaagcaagtcgtttgaagcttatgcagttagaacaagaggttgaccgagctaggcaacagggtgtgtacatggcttcaggagtagattcagcttatccaggatatggtggatgtttaaattcaggaatcg

SEQ ID NO: 2079 - DNA, 373 bp, Eucalyptus grandis
gctcacttgggtcgcctctcgttctctcgtttctcgcctccttcttcgaagcagcagccagcacagtcgcgcaacgtgaagaagataaaaagaagagtgtggtcctgacgggaggggggcgtctctctagaaagactacgttttttcctttcgttaagaaatgagacaggggtctttctagcttctgggtcttgaggaggagggccattttcttcttgccgattcgataggttggcagcccgggatgatggcggtgacttcggcctgtaaggacaagatggggatcgacaacgggaagtatgtgcggtacacgcccgagcaggtcgaagctctcgagaggctgtatcacgagtgcccgaagccgagttcactg

SEQ ID NO: 2080 - DNA, 421 bp, Pinus radiata
gttccagaccttttgcatcttcattattcttccgcctgtgaaaagatggggagatctccgtgctgtgagaaggctcatactaacaaaggggcctggactaaacaagaagacgaccgccttatcgctcacattcgagcccacggcgaagggggctggcgttcgcttcccaaggccgcaggttgcttgcctgcgctctgctttcttaactgaattaatggctgcctgtaaattttccgtttaaatataatgtttcttgatgtccgatataacgtttcttgattttccgatataatgtttcttgattttccgatataatgattttcgattttccgtttatatataatgtttcttgattttccgattgcagggctgctgagatgcggcaagagctgcagactgcgatggataaactacctgcgtc

SEQ ID NO: 2081 - DNA, 746 bp, Pinus radiata
gtttaattcgacgacacctttgcctgttagaaaggcgcgggaggcttatcggaagccacaccaaaccaaatcagaaataatgggtagggctccctgctgcgaaaaggttgggctcaaaaagggcccctggacgcccgaagaagatcagaaactcgttacttacatacaggagcatggccatggcagctggagggctctgccgcagaaagctggtgattatgaatttatatttagttctagaacttgcaagaaattctctgtatttttgttttttgggtagttttcatgggttgagttttatgcagggttgctgagatgcgggaaaagctgcagattgcgttgggctaactatctaaggccagatatcaagcgggggaagttcactgtgcaggaagagcagactattattcaacttcatgcactacttggaaacaggtggtccgccattgctactcaccttcccaagcgaaccgacaacgaaatcaaaaactactggaatacccacctgaagaagcgcttgctgcagatgggaatcgaccccgtgacgcacaagcccaagtccgaatcgattatggtacctggtgttcagtcgtccaatgggtcctcgaatctgagccatatggcgcagtgggagagcgcgcgcctggaagccgaatcgaggctggcgcgcgagtccaagctcagggcaaggggcctctggtctgcccagttgagaaacgttaatgcgagctcggatttattcagcc

SEQ ID NO: 2082 - DNA, 244 bp, Pinus radiata
gaagatatcaagcaaatagttacacaccaagaaaatccacaatgggtagatctccttgctgcgcaaaggaagggctcaaccgcggggcctggacgaaaacggaggatattattctctccgaatacattcgaattcatggcgatggtgggtggagaagtctccccaaaaaagcagggcttaagcggtgtggaaagagttgtagattacgttggttaaactatcttcgtcccgacattaaacgcgg

SEQ ID NO: 2083 - DNA, 1151 bp, Pinus radiata
cttcaacaggtttttgttctgaaatcctgttatcacttcgctccatcttccatttttgttttctgacaaccttttaaacatgggaagggcgccttgctgctctaacgatgacagaaacaaaggagcctggaccaaagaagaggatgacaggcttatccaatatattaaggttcatggagagggttgctggcgctctctccccaaggccgcaggtctgcttcggtgtggcaaaagttgcagactgagatggataaattatcttcgccctgatctcaaacgagggtttttctccgaagacgaagatgatcttattctcaaactgcacgccctccttggaaataacaggtggtctttgatagctggccgtttgccaggacgaacagataacgagataaagaactactggaactcgcatctgaagcgaaaacttatcagcatgggaatagaccccctaacccatcgtccttttcaaaagacttctcaccatcatccctctcctccacagaatgttagagaggctgaaacaacaccttccattgggattgttcaagatttctttcgttgcccgtctgaacttagcaccaaatccgagcaaatttcagatgctgcaagcggactcgcgcaggatgagcaaccccacccgaacctgaacctgaacctggagctctcaatagctcgctcctcagtccatcgagtagcagagaaggaggacgttgttaattcccagcaaggcgaaagcaatctgagtgagggaaagtgatatttatgtcattatggagactgccctccccctccaatgcaacaatgagatgatataaatgtccctttcccgctcaccaaagccctacggggcaataacgaatacatgaaaaccgtttggctcatagcaagtctagttttcaacacttactattatttaaggaacgtaaaaagtgtccagttcaattgatgtattttgtgacattttgctttgttagtcacttacacatgctacaagttttgttggtcagtcacctcacacttttggtgtgaaaaatggcttcaaggcttcctttgtatggataccagttgcattggcaatatgtaaaaatgcgacatgtaatgttttctaatggcaaagtatatattttaaaaaaaaaaaaaaaaaaaaa

SEQ ID NO: 2084 - DNA, 372 bp, Pinus radiata
tttttgttctgcaatcctgttatcacttcgctccatcttccatttttgttttctgacaaccttttaaacatgggaagggcgccttgctgctctaacggtgacagaaacaaaggagcctggaccaaagaagaggatgacaggcttatccaatatattaaggttcatggagagggttgctggcgctctctccccaatgccgcaggtctgcttcggtgtggcaaaagttgcagactgagatggataaattatctttgccctgatctcaaacgagggtttttctccgaagacgaagatgatcttattctcaaactgcacgccctccttggaaataagtggtctttgatagctggccgtttgccaggacgaacagat

SEQ ID NO: 2085 - DNA, 1285 bp, Pinus radiata
gggctgagagaaaagtattttccttgggctgaagagatcaggctaattatggggcggacaccttgttgtgaaaaaaatattgggctgaagaaggggccatggacacctgaggaggatcaaaagctgatagattacatacaaagccatggccatggtagctggcgtgcccttcctaaacgagcagggctcttgagatgtggaaaaagttgcaggctgagatggaccaactatttaagacctgatataaaacgtggacagttttcatttgaggaagagcagactataattgaactccatgctgttcttggaaacaagtggtctactatagctgggcatctgcctgggaggactgacaatgaaataaaaaattactggaacacccatttgaagaaacgccttcttcagatgggaattgatcctgtgacacacaggccaagaacagacctcttggctttttccaatatccaatcttcaatttttaatacacctggttttggtcatatggcccaatgggagagcgccagacttgaagcagaagctcggctgacgggagagtatttgagacaagccttattcatggcaggcaacggatcagccacagctgatctattgatgaggccgtgcaaatccgaatttggcaatgatcagtttaatttgacaaaaaatatgggcaacccaccatggatacagcagcctggaatggccttagactataagggtgccgtacctcagagtttggagcagtttttacagacaaatgtatgttctgcatcagacattaatgggggtggttgtttgagccatgaaggtggcttcaatattacgaagtttgcatctccatgttcaactctggatggaattcaaatcaaaacagaacctcagagtctgtgtggtcctcaagtagtgaaaaatgatagtcagtttcttcatagtgaaggagatctacgaaaacaagccatgcttgatatgaatgtaggatgtaatgttctcattaacatgaatgctgaatccaaggtttcatttggtcacaatggtattataactgaccaagaatacaataatttgggtcaaatagataataataaccatctttctcatgcagctactacactatggcctgttgaaggccagttgcaggccatagccagtgcctccatgcctggattgatatcttccaccagctgcacttcaaacaacatttacagccagcctggtttaattcctcttctcaattccacaacctcttcaatgggtgatacaaattcttacagagaagcgcagccag

SEQ ID NO: 2086 - DNA, 1218 bp, Pinus radiata
cgcagatcgggactgcaaacagaaccatagttctgcaacattcaatgggacggactccttgttgtctgaaagtgggactcaatcgaggtccctggacacccgaggaggatctttgcctctcaaattacatcgaagctcacggagaaggcgggtggagaacacttccaaagaaagcaggtctgctccgatgcgggaagagttgcagattgcgttggatgaattatctccgacccgatgtgaaacacgggcacatattacccgaggaggaagatttaatactcaggttgcatcgtcttcttggaaacaggtggtctttgatcgctggacgtatgcccggcagaacggataatgaggtcaagaactattggaatacccacctcagcaaaaagcttatcagtcagggtatcgacccgcggacgcacaaaccgttgtcagaatccgaagacatatgttcgagtcccgggaatagcgaagtgagccgcaagtctcaacgggaaaataacgctgaaataccaagaaaagttgccgatggcgcagttgatattcaagataaggaagaggatatcacagaagatcagacatctgctcaattgcctgagaatcagcttcttgaaacaagcaattctcaatgcccgtctgtcgctactgatttcgtgcctcaggctccctcgataccttccacggcttattcatttcaacagagcacaacttcaagtgttcccggaggcgtgtcggattcagttgatgttaatcataataagggaagtaagcaagttccttttcctctctcaaatactgcatgttttaatagttcggcacaaggggtagctggtgactatctcgaccaatatttgatgaagaatcttgttactaacagcaatgatctgataacatccactgtgagattaagctccgctttacaaactgcaccttttgtgggacaattcgattcaaatcatgtttttatgtcaggcaatgcatcgctcaatgaaaaacatcagatgcctcagaactcacaagctttggaaatggatccccaccattctttcatagcgcatccttctgaggagggcacctatgataaattgaaccatacaaggtgtgcagcttctgatcaggtcacatcattcaattatccatatcttatttctcataccgttacgggctcagcccttggggattttaatccggatatctttcctccttttgtggaatctt

SEQ ID NO: 2087 - DNA, 473 bp, Pinus radiata
gaccttttgcatcttcattattcttccgcctgtgaaaagatggggagatctccgtgctgtgagaaggctcatactaacaaaggggcctggactaaacaagaagacgaccgccttatcgctcacattcgagcccacggcgaagggggctggcgttcgcttcccaaggccgcagggctgctgagatgcggcaagagctgcagactgcgatggataaactacctgcgtcccgatctgaagcgtggaagcttcaccgaagaagaagacgagctcatcatcaaactccactccttcgttggcaacaagtggtctttaattgcagggagattgcccggacggacggacaacgagataaagaactactggaacacacacatcaaaagaaaattgctgagcaagggactcgacccccaaacccatcgtccactcggccagccaaacaatacccccgtcactcggcctgttctcgagcacga

SEQ ID NO: 2088 - DNA, 1150 bp, Pinus radiata
aaacttgctcacggattccgacccttccggctaaagctgctgcatttctgtgtgtattgaagatggggagatctccctgctgtgaaaaagctcatacaaacaaaggggcgtggaccaaagaagaggacgatcgcctcatcgcccacattcgaactcacggcgaaggttgctggcgctcgcttcccaaggccgcagggctgatgcgctgcgggaagagctgcaggctccgatggataaactacctgcgtcctgatctgaagcgtggaaacttctcagaagaagaagacgaactcgtcatcaaactccactccctactcggcaacaagtggtctcttattgcaggcagattgcccgggcggacggacaacgagataaagaactactggaatactcacatcaagagaaaattgctaaacaggggactcgacccccagtcccatcgccccctcggccagccgcacaacagcaacacgacctgcccctctctgcccgccctcgagcacgaaattcttgtgttccagaggccaagaacgccggagatagcagatttctttcaatacgagcgctctgaaagctcgccgatggaaccggccacttctaaagacgcggaagagcatcccgacctcaatcttgatttgtgtatcagcttgccagttcattcgccccccgccacgagcagagcttcgagcgtcgatggaaccgtggattcaaaacctaattcggtttcttgtcacatggggttgcaagtaaattatggtgtgcaatgtgagaacagatattgtgaagagagtgcttccggtgtctcgagtttttacacgctcgtcttatagaagatttgagctttatggtttgcttattaacaccactaagcattcatctgatgaataggcagagtgaaactatatgtttgctcattgtggcagcccggagtttgcagttaatagacagggacgcagctggacagcagttacccaaattattgtttaaagagtgtagatagctcacctatgaacataggaatcgctgtttcaccatggcgctctgtaatatttaaagcgattcatatggaagcttgagcgcgaagtctccagtgccgtatcatcaactaatgtaattgaactgcaattggtcacaaaaaaaaaaaaaaaaa

SEQ ID NO: 2089 - DNA, 723 bp, Pinus radiata
gtttgtcttccccttcattcgcaattgcttgcttggtgtgctgagaggggaggaggacgaggaggaggaaacagagcaacaagcagcccgacagacacacatctcaacaggtggatctttctcgcccgccattctatcaggtgtattattgtgcaacatatagctgaaatatggtttgggggatcttgtagtaggagcatacgatcaattttaggaaccaaggctcattttaactatgggtacaggagagatggggacaccagcgaaaacaactaaggcatccacaccacaggaacagcctccaacaagcactgccatgctttatcctgactgggctgcagcattccaggcttattataactctggaaccacaccaccacctcctcctgcgtactttcattcaagcgttgcatctagtccacagcctcatccatatatgtggggggggcagcctctaatgcctccatatggaactcttcctcccccatatgcggcaatgtatcatcatggcagcatgtatgctcatccatccatgcctccgggtgcacatccatttgctccttatgtgatgacatcgtcgttaagtacaactgaaggtgcacctgtaggcacaacttctggtgcagatgcagaaggaaagccatctgaaccaaaggaccaaactctattgaagaggtccaaaggaagcttaggcagtcttaatatgcttactggcaagattac

SEQ ID NO: 2090 - DNA, 768 bp, Pinus radiata
gtttgactgaaggtttagagttcgattcccacaggtaacagaggccacgaaggtttcaagttcgattcccacaggtcacagaggccacgaaggtttcaagttcgattcccacagttcacagagccaacgaaggtttcaagttcgattccactaggtccaggaggagcaaagaagatcgttgggctcaatggggtgcaaccagtcgaaagtcgagagcgaggaagaggtggtgaagtcaaaggagaggaaacaatttatgaaggagtcagtggcggcccggaatgctttcgccgccgctcattcggcgtccataacgtcgctcaagaacattggggccgcgttgaacgactacgggcagggcgagtcaaaggaatccctgagccaggggcatctccccgtcccccacatatatggcgatccactgcctcccgcgcctcccctgcctccgctactccctcctccgcgcccagatgagcaccccgctcgccccctggagcgctctgccagtgcaccggccatcgccttacagcaacaggcggaggaagacagaaaccctgaagcaaatgctggtgcttccattccagaaggagaagaagacgaagtagaggaggaggaggacgagcatctggtggaggtgtctcactcggttacttcttttaatccacctccgcgtccgcctccttcatccagcgaacccccaccgcctccgctgcctccgctgacgaatcagtgggacttctttgacgacaacagctacttcgagcggca

SEQ ID NO: 2091 - DNA, 479 bp, Pinus radiata; identical to SEQ ID NO: 350

SEQ ID NO: 2092 - DNA, 557 bp, Pinus radiata
gaaagaaggaaagaatggggcgagggcgcgtcgagctgaagcggatcgagaataagattaaccgtcaggtcacgttttcgaaacgccggaatggtctgctgaaaaaggcgtatgaactttcagtgttatgtgatgcagaggtagcactgataatattctcaagcagaggaaaactctatgagttcggaagcgccgggatgctcaagactctggagcgatatcaaaaatgttcatacgtattgcaagacgcgactgtatcggaccgggaggcgcagaattggcatcaagaggttggcaaattaaaagccagagttgaacttttacaacgatcacaaaggcacttattaggtgaagacctgggccccttgagtattaaggagctgcaacaactggaacgtcaacttgaggttgcactgacacatgttaggtcaagaaagactcaagtcatgttggaaatgatggatgaactacgcagaaaggagcgaattttacaagaagtaaacaaatctctgcgcaagaagttgcaggaggccgagggacaggcattcaatgccatg

SEQ ID NO: 2093 - DNA, 356 bp, Pinus radiata
agtattgaaattcccctgttttgatctgatagctatggatctgatggagtcttttgaggcaaaggggaagggagagaagaggagaacggtgaggggaaaaacccagttgaagaggattgagaacgggaccagcaggcaggttactttttgtaagcgcaggaacggtctgctgaagaaagcttacgagctctcggtgctttgtgatgccgaagtggcacttattgttttctctccaagagggaagcgctatgagttcgctaatcccagcatgcagaaaatgttggcacggtacgaaaatttttcagaaggaagtaaagcaacgagtacagcaaaagagcaagatgtccagggtttaa

SEQ ID NO: 2094 - DNA, 404 bp, Pinus radiata
gggcaaggggaaagacacagatgagaaagatcgagagcgcgaccagcaggcaggttacgttttctaagcgcagaaatggattgatgaagaaagcttacgagctgtcggtgctctgcgatgcccaactgggactgattgttttctcccccagagggaaggtctatgaattctccagtacctgcatgcagaaaatgttggcacgatacgaaaaatgttcagaaggaagtgacacgagtacatcaaaagagcaagatgtccagtgtttaaaacgagaaagtgcgaatatggaagaaaggattgaaattcttgaatccatgcaaagaaagatgttgggcgaggagctggcatcatgtgcattgaaggatttgaatcagttggagagccaggttgaacgaggtttgaga

SEQ ID NO: 2095 - DNA, 584 bp, Pinus radiata; identical to SEQ ID NO: 340

SEQ ID NO: 2096 - DNA, 453 bp, Pinus radiata
ctcttgtctgttctcgaaatcggccaaaatgggaaagaagagggtggagctgaaacgcattcaaaaccctagcagtcgacatgctactttctctaaacgcaagaatggattgctaaaaaaggcgttcgagctttctgtcctctgtgatgctgaagtcgctctcatcattttctctgaaactggcaagatttacgaatttgcgagcaataacgatatggcagcaattctgggaaaataccgagtacacgaagaaggcactgaaacgtccagtccaacatcgcttcaaaacgtaaagtatcatgaatcagggcttgagaaattgcaagagaagttgaccgctttgcaaaagaaggaaaagaacttgattggtgaagacttggaggtattaacaatgaaagaactgcaacggcttgaaaaacagttacaaattggcataaaaaggttagtgataga

SEQ ID NO: 2097 - DNA, 509 bp, Pinus radiata
gcaaccggagctttaagactagaatatatatgtagccctcgggctctgacgaatactgaaactagagatacccacctcttatctggtgtgtaaggcacgcaaaatgggaaagaagaaggtggaggtgaaactcattcaaaaccctaccagtcgccaaggatgtttctacaaccgcaagtgcggtttgcttaaaaaagcgtttgagctttctgttctctgtgatgctgaagttgcccttataatcttctcccaaaccggcaagatttacgagtttgcaagccatgacgacgtcaacgcaattctcgcaaaataccggatacaaacgggaacaacaacaaacgcgatgccttcctcgcttcaaaacaccgagccggagacgttgcatgaggagacaaatatgttgggaaaaaggaaaaaagtggagaagttgcatgagaagatcaatatgttggaaaaaagaggaaaaaacatggttggtgaaaatttggagtcattaacggtcaatgaat

SEQ ID NO: 2098 - DNA, 430 bp, Pinus radiata
gtttgttgcggttctccgttccgcgggtctgattgattaattaaagagcaagagtgacgaaaggagtctggagaatggcaagaggaaagacccagatgaagaagattgagaacgtgaccagcagacaggtcacgttttctaagcgaagaaatgggttgctgaagaaggctttcgagctctcggtgctgtgcgatgcagaagtgggacttattgtattctccccaagtgggaagctctatgaattttcgcgtccctgtatgggaaaattgttggagaagtatgaaaagaattcacgagaaagtggtataaataatgcggctaaagagaaagatactcagcattcaaaacgcgaaattgcaaatatggaagagaaaattaggatcctcgaatcaacagaaagaaagatgttggggcaaaatctagcatcatg

SEQ ID NO: 2099 - DNA, 513 bp, Pinus radiata; identical to SEQ ID NO: 380

SEQ ID NO: 2100 - DNA, 526 bp, Pinus radiata
ggattcttgtatttttgtgtgttgctgctgcaacagttcttaaataccaagacattgatgagagcttgagtaatatttctgcaaaaacccaagtaaaccctgaagctagtccaaactagtggaaggaacctcggctattctgtaagttcactcagattttgagaaactcttgggattttgctcaaaatggggcgtggtaaaatagagatcaagaagatcgagaacagcgtgcacaggcaggtgaccttctgcaagcgccgaggcggtctgatgaagaaagcctacgagctttcagtgctgtgcgatgcagatgtagcgctcattgttttctcgagccgaggaaagttgtacgagctgggcaccagcaacaacaacaacaacagtatgaggtcaatattggaaagatatcaaaagtgttcacagacggcaaaacatatgaacttttcgaataatacttcagacgagaaaatgaagcaagaaataaatttacttaaacaacaaattggatcagctaaacttactaaca

SEQ ID NO: 2101 - DNA, 295 bp, Pinus radiata
cctcttggaaggcaaatccttgtactgttccatcctcacgaattggaggttttggaggtggccaggtcatcctcccattagcccatactgtggaacatgaagagtttttggaggttatcaagttggagaatcatggcctgacacaggaagaagctttgctatcgagggatatgtttctgttgcagctttgtagtgggctcgatgaaaatgcagttggggcctgtgctgaacttgtctttgctccaattgatgcatccttagctgacagttctcctttgctcccttctggtttcag

SEQ ID NO: 2102 - DNA, 296 bp, Pinus radiata
ggagaatcatggcctgacacaggaagaagctttgctatcgagggatatgtttctgttgcaggtatcgtatcgacgtgtttctattgcttagcagagaaacttgaagtgtaaaattttaatttttactaattcatttgaattgatgatcttgccattttgattggacagctttgtagtgggctcgatgaaaatgcagttggggcctgtgctgaacttgtctttgctccaattgatgcatccttagctgacagttctcctttgctcccttctggtttcagagtcattcctttagactc

SEQ ID NO: 2103 - DNA, 475 bp, Pinus radiata
gaagtgtggatgttcttactgctttctcaactggaaatggaggaacaattgagcttttatacatgcagatgtatgcgccaactactttagcttctgcccgagatttctggactcttagatacacttctgtattggaagatggtagtcttgtggtttgcgagagatccttgagtggaactcagggaggtcccagcatgcccgcggtgcagcagtttgttagagcagaaatgcaacccagtggatatttgattcggccatgcgaaggtggaggttctctaattcatattgttgaccatatggatttggagccatggagtgttcctgaagtgctacgtccactgtatgaatcatccactgtacttgcccaaaaggttacaatgtcggccttacgccatttgcgtcaaatagcacaagaggcatcttctgatgtggtccttggctggggaagacaacccgctgcattacggacatttag

SEQ ID NO: 2104 - DNA, 1612 bp, Eucalyptus grandis
cccatctcccttcaaaaaacgacgccggcgacgacgacgaccccccaccaccaccaccaccatcgacgactcggcacagcacgcgaaccagtcgcggaaagttcgagaaggaattcgacgctcgggaatcggccgggagaagaggaggaagacgacgaatcggagccttatggtgtccgtgaacccgaacccggcgcaagggttttacttcttcgatcccgcgaacacgaggatccacggtgtcaacgccggctcggcggccgagggcggcggcgccgcgccgccgtacgcggaggacccgagcaagaaggtgcggaagccgtacaccatcaccaagtccagggagagctggaccgagcaggagcacgacaagttcctggaggcgcttcacctgtttgatcgtgattggaagaagattgaagcttttgttggatcaaaaacagttattcagattcgtagccatgcacaaaagtactttctaaaggttcagaagaatgggacaagtgaacatgtaccaccaccacggccaaaaaggaaagctgcccatccatacccacagaaagcacctaaagctccagttgtttcccaagtcaatgggccatttcaagtttcatctgcttttttggaacccgggcatattgtcagacctgatggatcagcattgcttgggaattcccgtacaagtgtagccttgtcttcatggagtcataactctgtacccgcaatgagtgcatcacaggggacaaaagatgtaggaatttctggcccaccagttccaagtaattgttgcaacagcagtagtaatgacagtacaccgaggtcctggccaaatgctcaagcaattgaacctttggatcaacagaaacatcttagagttatgccagatttcgcgcaagtatataggttcattggcagcgtttttgacccggatgctggtggtcatctacagagattgaagcagatggaccctataaatttggaaacggtagtgctcttgatgaaaaatctcagcgcaaatttgacaagccccgaattcgagaaatatcagcacggcttgtttgcttcatatgagggtggtcctgagaagtccaaatctggcggttccttcaagttgctccccgaaaaatctggaagcctaattctgtctgcgtaacttgtgactttaacaaactcgacctcttcgagtcgggcatcgtcggggaaaactgcactgtctttgaagatcaagattagtagtggagaataaagatgccaaggatcgccaagctgtggggatcgcaaaactggtccgtaactgaggtctgggcttgtggtttttgtaggtctgtaaatatcctgtgaaatgggaacacggcagtttgtgcgaacaatgctgagagacatcatcggaagtttaggctttgtataggttcttatcggactttgtatatggctgcgagatacagagatgtcgtgcgacctagaataaagcttaggcgtcgggtctgttgtgtttatgtatatgtgcgcgtgtaagatcgaagaagaggaagtagcgaggaacgtttgatcaggttgtggtttttggtagactatattgcattggctgctttctctcaaaaaaaaaaaaaaa

SEQ ID NO: 2105 - DNA, 1576 bp, Pinus radiata
gaccttttgcatcttcattattcttccgcctgtgaaaagatggggagatctccgtgctgtgagaaggctcatactaacaaaggggcctggactaaacaagaagacgaccgccttatcgctcacattcgagcccacggcgaagggggctggcgttcgcttcccaaggccgcagggctgctgagatgcggcaagagctgcagactgcgatggataaactacctgcgtcccgatctgaagcgtggaagcttcaccgaagaagaagacgagctcatcatcaaactccactccttcgttggcaacaagtggtctttaattgcagggagattgcccggacggacggacaacgagataaagaactactggaacacacacatcaaaagaaaattgctgagcaagggactcgacccccaaacccatcgtccactcggccagccaaacaatacccccgtcactcggcctgttctcgagcacgaaattccggcattccagaaccctgcaacgccggagatagcagacttgttacagcaccaccgattggaaagctcgcctatcaaaccggcagcttcggatgcggaagagcatcccgacctcaatctgaatttgtgtatcagtttgccgtctaattcggccccggccgtaaacagagtatcgagcgtcgatacaacagtagattcaaattctaattctggcgacgggctgtgctggcagtttctctgacggaggtcgtttcaataagagggtgtgcattatcgcagcacgaccacgcttatgaccagtgccaaaggcacaaggactcgtggtggaaagatgtttatagtgcaaagatctccgacttgcttatcgtggaattgaaataatgtgttggagggcgcagagacggtgggaaaaaggttttgtgtgttgcaggtctggagatatggtggggaagtgtatggataataggtatttctataatctgcaattctggtgcaattattcacaacagttagcatttatcaaggaaaaatatacttcgttttgtgttctcagtcgtaggagatataccagtaccagtacattatctgcttgcagggtaagttgaagttcattacattgcaatgccggtgccttatcgccctcatggccgtatttttaaagacaaatcccacgctgcttcagcctgcaacaagatatctttactctcattacactgatacataccactggtcaaaacttcccatcactgtcataggctggaacagagaaactgaagcctgttcaaaattttcaatacttttagatctggtaaagaagccaatgtgagaactgcaaatttcattggggcaaaactcaggtgtactgtcaaagcatgaaagtccagaatttgatggtgggatattcaacatacggcagaggtacccccaatgatgtagaaagtattgggctgggtgcctattaccacttgcagtggtgtaggaaaaagtgtagttctattgcaggagtgtaataaatgaggtagatatttttctccccgattgatgttcaatatagactcagcgacgttttatgtgtgttgaaaaaaaaaaaaaaaaaaaaa

SEQ ID NO: 2106 - DNA, 210 bp, Pinus radiata
ctatgctattacagaatgtgcctccagcactacttgtccgcttcttgcgggaacatcgctcagagtgggctgattgtaacattgatgcttattcttcagctaccatgaaagcaaatgcttacaatgttccaggttcactgggaggcattacagggagtcaagttatccttccactggcacatactgtggaacatgaagagttcttggaag

SEQ ID NO: 2107 - protein, 27 aa, Pinus radiata
MKHHVVHNCCSKKAVKRGFWSPEEDLK

SEQ ID NO: 2108 - protein, 126 aa, Eucalyptus grandis
GISRNFVKTRTPTQVASHAQKYFLRRTNQNRRRRRSSLFDITTDSYFGVSSSTMEEGHHQAHQVPSFPLSLPPAVSPGTGEKLLESLRLRKEGCQSKPTPSKPIRPVPILPIPPSSKMAALDLNKA

SEQ ID NO: 2109 - protein, 130 aa, Eucalyptus grandis
MPGFTRARKMSMSGEEEGDLRRGPWTREEDNLLIHSITCHGEGRWNMLAKSAGLKRTGKSCRLRWLNYLRPDIKRGNLTPQEQLMILELHHKWGNRWSKIAQYLPGRTDNEIKNYWRTRVQKQARQLNIE

SEQ ID NO: 2110 - protein, 146 aa, Eucalyptus grandis
CCDKVGLKKGPWTPEEDQKLLAYIEENGHGSWRALPSKAGLQRCGKSCRLRWTNYLRPDIKRGKFSLQEEQTIIQLHALLGNRWSAIATHLPKRTDNEIKNYWNTHLKKRLAKMGIDPVTHKPKNDALVSSDGQSKSAAKLSHLAQ

SEQ ID NO: 2111 - protein, 99 aa, Eucalyptus grandis
RTLPKNAGLRRCGKSCRLRWTNYLRPDIKRGRFTFEEEETIIQLHGVLGNKWSAIAAQLPGRTDNEIKNYWNTHIKKRLLKMGIDPVTHSPRLDLLDLS

SEQ ID NO: 2112 - protein, 59 aa, Eucalyptus grandis
MGRGRLQLKRIENKINRQVTFSKRRAGLLKKAHEISVLCDAEVALIIFSAKGKLFEYST

SEQ ID NO: 2113 - protein, 79 aa, Eucalyptus grandis
VKHDVETLSSKVKMAEETVKRVTGLNPMLHVMSDMSSVGVPPFDGSPSDTSADAAVPVRDPKHQFYQTNSSNPASSADD

SEQ ID NO: 2114 - protein, 104 aa, Eucalyptus grandis
QVAQLRVENSTLLKRLSDISQKYNVAAVDNRVLEADVETLRAEVKMAEETVKRVTGLNPMLHVMSDMSSVGVPPFDGSPSDTSADAAVPVRDDPKHQFYQTNSM

SEQ ID NO: 2115 - protein, 71 aa, Eucalyptus grandis
MGRHSCCYKQKLRKGLWSPEEDEKLLRYITQYGHGCWSSVPKLAGLQRCGKSCRLRWINYLRPDLKRGTFS

SEQ ID NO: 2116 - protein, 55 aa, Eucalyptus grandis
ELQHLEQQLSGALSSVKEKKEQWLLEQLERSRLQEQRAMLENETLRRQVDELRGF

SEQ ID NO: 2117 - protein, 62 aa, Eucalyptus grandis; identical to SEQ ID NO: 618

SEQ ID NO: 2118 - protein, 49 aa, Eucalyptus grandis
LFPPQSEGFFNPMDGNLSLQIGYNPTCLDEMNASVSSQNVAGFIPGWML

SEQ ID NO: 2119 - protein, 195 aa, Eucalyptus grandis
SGSQVSIIMISSTGKLHEYISPSTSTKKMYDQYQQALEVDLWSSHYEKMQENLRKLKEVNKKLQLEVRRRFGEGLNGMSLSELCGLEQDMDNAVSLIRERKYKTLGNQIDTARKKKKNAEEINKSLLQDWTNLIKHLREDDPHFGMVDNGRDYEAVIGYTDAAAAARLYTLRLQPDQPNLTSGGGSEITTYPLLE

SEQ ID NO: 2120 - protein, 92 aa, Eucalyptus grandis
MAFKSPGGITWLKHLLVKNFYLGEHLKCRNGLIKKAYELSVLCDIDIALIMFSPSDRVSHFSGKRRIEDVLTRFINLTDQERTLLDVQDRRT

SEQ ID NO: 2121 - protein, 41 aa, Eucalyptus grandis; identical to SEQ ID NO: 617

SEQ ID NO: 2122 - protein, 96 aa, Eucalyptus grandis; identical to SEQ ID NO: 655

SEQ ID NO: 2123 - protein, 76 aa, Eucalyptus grandis
FLFRRKQGAVEELKMVQEVRKGPWTEQEDFQLVCFVGLFGDRRWDFIAKVSGLKVAGENNRYVRFKAWGFFGRSYF

SEQ ID NO: 2124 - protein, 55 aa, Eucalyptus grandis
MGRSPCCEKAHTNKGAWTKEEDQRLIDYIRLHGEGCWRSLPKSAGLLRCGKSCRL

SEQ ID NO: 2125 - protein, 123 aa, Eucalyptus grandis; identical to SEQ ID NO: 657

SEQ ID NO: 2126 - protein, 105 aa, Eucalyptus grandis
MARFPRVDKSNSKKTVKKGAWSAEEDQKLVAYIKRYGIWNWTHMAEPAGLARTGKSCRLRWMNYLRPNIKHGNITQEEEEIIINLHRVLGNRWASIASRLSGRTD

SEQ ID NO: 2127 - protein, 115 aa, Eucalyptus grandis; identical to SEQ ID NO: 660

SEQ ID NO: 2128 - protein, 155 aa, Eucalyptus grandis
MGRKCSRCGNIGHNSRTCTTFMGAASACGLKLFGVQLDLSSSSPPSSSASSGSAHPYSLVIKKSLSMDRLSSSSASSSSPSSSLSSPRVLADEHCNKTSLGYLSDGLAARSQEKRKGVPWTEEEHRTFLMGLEKMGKGDWRGISRNYVTTRTPTQ

SEQ ID NO: 2129 - protein, 145 aa, Eucalyptus grandis
RGWRQIEEHVGTKTAVQIRSHAQKFFSKVARGVSGSSEGVIKPIEIPPPRPKRKPMHPYPRKSVDSKEVKLSYQQERSPSPISSVADENTGSPTSVLSAHGSDMLGSASLHQQNRCSSPTSCTTDVPSIGLAVIEKQPEIFKEED

SEQ ID NO: 2130 - protein, 156 aa, Eucalyptus grandis
FGHEFTSSPASSSSLSSSRISIGENSDKASLGYLSDGLLGRSQEKKKGVPWTEEEHRTFLVGLEKLGKGDWRGISRSYVTTRTPAQVASHAQKYFLRQVSFNKKKRRSSLFDMVDVKTAAGDRLGSLTAKPSESVPNCKMGTLMSHLQVHDARTTQ

SEQ ID NO: 2131 - protein, 49 aa, Eucalyptus grandis
MVQEVRKGPWTEQEDFQLVCFVGLFGDRRWDFIAKVSGLKVAGENNRIE

SEQ ID NO: 2132 - protein, 151 aa, Eucalyptus grandis; identical to SEQ ID NO: 651

SEQ ID NO: 2133 - protein, 133 aa, Eucalyptus grandis
MGSRTRVGGGGDDGRVVNGMPSFVPQLPTSNSMGSEGNSIRSSRITDFGTLEQSLGYRIEDAVDLSRNPVFNQMKSSAQALGADVQFGSLNKSLSSSDRNLSVNIVGSQTLSMHRESQSNLVSIPGAHRENWG

SEQ ID NO: 2134 - protein, 150 aa, Eucalyptus grandis
MPPPRAATPDVAGDESSGADAGAGEIMLFGVRVVVDSMRKCVSLNNLSQYQHPQDANPPNASGGSGGNKEEAAKGYASADDAAHNPGGGRERKRGVPWTEEEHRLFLLGLQKVGKGDWRAISRNFVKTRTPTQVASHAQKYFLRRSNLNR

SEQ ID NO: 2135 - protein, 125 aa, Eucalyptus grandis
ENVASGSTERPRIRHQHSQSMDGSTSIKPEMLMSGSEDASAADAKKAMSAAKLAELALIDPKRAKRIWANRQSAARSKERKMRYIAELERKVQTLQTEATTLSAQLTLLQRDTNGLTAENSELKL

SEQ ID NO: 2136 - protein, 72 aa, Eucalyptus grandis
MADSEHSSSDDTYVDSREETSEESKLDFSEDEETLVIRMYNLVGERWSLIAGRIPGRTAEEIEKYWNSRYST

SEQ ID NO: 2137 - protein, 135 aa, Eucalyptus grandis; identical to SEQ ID NO: 665

SEQ ID NO: 2138 - protein, 123 aa, Eucalyptus grandis
DTEDSKKKERHIVTWSQEEDDILREQIGIHGTENWSIIASKFKDKTTRQCRRRWYTYLNSDFKKGGWSPEEDVLLCEAQKIFGNRWTEIAKVVSGRTDNAVKNRFTTLCKKRARYEALAKENT

SEQ ID NO: 2139 - protein, 126 aa, Eucalyptus grandis
MGRQPCCDKLGVKKGPWTAEEDRKLVNFILTHGQCCWRAVPKLAGLRRCGKSCRLRWTNYLRPDLKRGLLNEAEESLVIDLHATLGNRWSKIAARLPGRTDNEIKNHWNTHIKKKLIRMGIDPVTH

SEQ ID NO: 2140 - protein, 108 aa, Eucalyptus grandis
PGSRSSNRRVERKKGNPWTEEEHRRFLIGLQKLGKGDWRGIARDFVTTRTPTQVASHAQKYYIRQSNAGRRKRRSSLFDMAPDMVCLLYDVASAHSLHSVQISGSCMF

SEQ ID NO: 2141 - protein, 109 aa, Eucalyptus grandis
MRKPCCDKQDTNKGAWSKQEDQKLIDYIRKHGEGCWRTLPKAAGLLRCGKSCRLRWINYLRPDLKRGNFAEDEEDLIIKLHALLGNRWSLIAGRLPGRTDNEVKNYWNS

SEQ ID NO: 2142 - protein, 65 aa, Eucalyptus grandis
SPEEDEKLFNYITRFGVGCWSSVPKLAGLQRCGKSCRLRWINYLRPDLKRGMFSQEEEDLIVSLH

SEQ ID NO: 2143 - protein, 121 aa, Pinus radiata
AKSYLGSLTETIQSLNAELERTRSELVEAKKREEEIISKEAERVEKNKREVENLELNLLQTTAEAGRAKLELETAYEEVQSARLETAQLRAALEATEGKFEAMLSETRLEAEHVKGAIEKY

SEQ ID NO: 2144 - protein, 71 aa, Pinus radiata
EILVTQIEQLQRKERMFSEENNFLRKRIVDPHSVLTTPASGSGSLQRSEVETQLVMRPPSSNADFLFNSSH

SEQ ID NO: 2145 - protein, 110 aa, Pinus radiata; identical to SEQ ID NO: 946

SEQ ID NO: 2146 - protein, 50 aa, Pinus radiata
LRGANGCTIPSIGLTSIERVEVQTQLVMRPPHATEMDDNFMDVDNVPLSG

SEQ ID NO: 2147 - protein, 168 aa, Pinus radiata
EDGSLVICERSLSAAQGMPMVSQSQSFVHGELLSSGYLIRPCEGRGALVIMVDHRNLEASSVPEALRPLYESSTFFAQKMTVEASYHLQGKVQPEMISLSKKLQQPCNVRSYSQRLCRGFNEAVNTLPDDGWMSLSKDGLGDVTICESFVKLPEPNASQIAYVNSMGT

SEQ ID NO: 2148 - protein, 120 aa, Pinus radiata
ENESLRARLRHMNGDDINSLKLPELFHLEQQLETAATQVRRRKDQVLDNEKIKRRNKMRRKEDENIILHEMLDQHHGQMEEDNAQINFLFCQPLNRSDTTFPASLLRLQPNQPNLQDIGY

SEQ ID NO: 2149 - protein, 165 aa, Pinus radiata
SPQVEHRPFSPHEDATIIQAHARHGNKWATIARLLPGRTDNAIKNHWNSTLRRRYHGEKDQSNGLAVNLESAAEDKETMTPMTPVTATATATATAMPVALVFPTAADNVRKRSNSSCSANDNPGDAEVESCRLKRLNFSESPSSSENINNNNNNEEAVSGHCNSA

SEQ ID NO: 2150 - protein, 68 aa, Pinus radiata; identical to SEQ ID NO: 990

SEQ ID NO: 2151 - protein, 152 aa, Pinus radiata
QAGLQRCGKSCRLRWINYLRPDLKRGTFSPQEENLIVELHSVLGNRWSQIATHLPGRTDNEIKNLWNSCIKKKLRQRGIDPNTHRPLSEVNAEAGDSKNDNSNKEVETQAAMDESHVSAGNEFKHLNAIPRADTANPKFFHVPVEDNTLIAS

SEQ ID NO: 2152 - protein, 89 aa, Pinus radiata
MRCTRWQGLPFSSKPKVKKGLWSPEEDEKLINYMMKNGLLGCSWSYVAKQIGLQRCGKSCRLRWTNYLRPGLKRGAISPEEEQLIIHLQ

SEQ ID NO: 2153 - protein, 94 aa, Pinus radiata
MGRAPCCDKANVKKGPWSPEEDTKLKAFIEQHGTGGNWIALPQKAGLKRCGKSCRLRWLNYLRPDIRHGGFSEDEDNIICSLYASIGSMVSIIA

SEQ ID NO: 2154 - protein, 217 aa, Pinus radiata; identical to SEQ ID NO: 952

SEQ ID NO: 2155 - protein, 113 aa, Pinus radiata
LGWGRQPAALRTFSQRLCKGFNEAVNGFTDDGWSLMGNDGMEDVTILVNSSPSKLFGQQFASSDGLPALGGGILCAKASMLLQNVPPALLVRFLREHRSEWADSNIDAYSAAS

SEQ ID NO: 2156 - protein, 107 aa, Pinus radiata
MGRSPCCEKAHTNKGAWTKEEDDRLIAHIRTHGEGCWRSLPKAAGLMRCGKSCRLRWINYLRPDLKRGNFSEEEDELIIKLHSLLGNKWSLIAGRLPGRTDNEIKNY

SEQ ID NO: 2157 - protein, 124 aa, Pinus radiata
LWLRFSGMDRSNSATGEEDVLSRCRERKRFMKLAIENRYKLATAHVAYMDSLRRMGTGLRLFAEGETMSESSYSTSPIGTSELAVVLPEKSVSPSPFPSSSPSLSQPQSPRSERAESRSPLDSF

SEQ ID NO: 2158 - protein, 110 aa, Pinus radiata
DGLVQNSRERKKGVPWTEEEHKMFLLGLHKLGKGDWRGISRNFVTSRTPTQVASHAQKYFLRQSNLNKRKRRSSLFDISTDSMEDCYQGIPELSPVMHDLSLGQNSSLTS

SEQ ID NO: 2159 - protein, 175 aa, Pinus radiata
SSPVSKPKLRKGLWSPEEDDKLINYMMKNGQGCWSDVAKQAGLQRCGKSCRLRWINYLRPDLKRGAFSPQEEQLIIHLHSILGNRWSQIAARLPGRTDNEIKNFWNSCIKKKLKHLSASTNNSKSISAPNRTSTMNSSITPFSESSAEPLEVMATRYQPSNAFNHEVPTAENQVL

SEQ ID NO: 2160 - protein, 78 aa, Pinus radiata
MGRAPCCEKVGLKKGPWTPEEDQKLLAYIQEHGHGSWRALPQKAGLLRCGKSCRLRWTNYLRPDIKRGKFNPQEEQTI

SEQ ID NO: 2161 - protein, 159 aa, Pinus radiata
RTPRCDQMGLKKGPWTPEEDQILISYINKHGHGNWRALPKQAGLMRCGKSCRLRWTNYLRPDIKRGNFSLKEEQTIIHLHQILGNRWSAIASHLPGRTDNEIKNVWNTHLKKRLLQIGVDPVTHAPRGYNVSNCYTAVNIRDHHGEQADHQLQSHVCVS

SEQ ID NO: 2162 - protein, 49 aa, Pinus radiata
TPEEDRILISYIKRNGHGKWLALPKQAGLSRCGKSCRLRWTNYLRPNIK

SEQ ID NO: 2163 - protein, 78 aa, Pinus radiata
MGTGEEATPTKPAAKPSSSSQETPTTPVYPDWAAAFQAYYGPGATPPPPAFFASTVGSAPTPHPYMWGGQPLMPPYGT

SEQ ID NO: 2164 - protein, 113 aa, Pinus radiata; identical to SEQ ID NO: 935

SEQ ID NO: 2165 - protein, 107 aa, Pinus radiata
TKAAIKRLQSQIMVAFQAVDTTSAAILKLREDELYPQLVELSKGLMQMWRAMYECHQVQNHIVQQVRHLGNLASAEATSSYHQQATIQLEAQVTAWYDSFCRMITSQ

SEQ ID NO: 2166 - protein, 38 aa, Pinus radiata
MGAPKQKWTSEEEGALRAGVEKYGAGKWQTILKDPEFA

SEQ ID NO: 2167 - protein, 158 aa, Pinus radiata
SGHMDGGSGEDQDAADQDHDHDHDHDHEQQQTRRKRYHRHTARQIQEMEALFKECPHPDDKQRQRLSIELGLKPRQVKFWFQNRRTQMKAQQDRSDNAILRAENENLRNENVALREAIKNGACPNCGGSTSLGEMPGFDEHHFRIENTRLKEELDRVS

SEQ ID NO: 2168 - protein, 122 aa, Pinus radiata
MGCTQGQRQGEWEGKGVPSNSSRRSLRKGLWSPDEDIELTTYIMRKGLMGCWNYIAKQAGLQRCGKSCRLRWINYLRPGLKRCAISPQEERLIIQLQSSLGNRWSQIAAHLPGRTDNEVKNY

SEQ ID NO: 2169 - protein, 101 aa, Pinus radiata
MGRSPCCEKAHTNKGAWTQQEDTRLVAHIRAHGQGGWSSLPKAAGLLRCGKSCRQRWINYLHPDLKRSNFSEEEDELIVRLHSLLGNKWSLIAGRLPGRTD

SEQ ID NO: 2170 - protein, 133 aa, Pinus radiata
RLLPGRTDNAIKNHWNSTLRRRYHGEKDQSNGLAVNLESAAEDKETMTPMTPVTATATATATAMPVALVFPTAADNVRKRSNSSCSANDNPGDAEVESCRLKRLNFSESPSSSENINNNNNNEEAVSGHCNSA

SEQ ID NO: 2171 - protein, 120 aa, Pinus radiata
MRCKTGQAQGVLEVEGTHPAPSKPKLRKGLWSPVEDNQLTNYILRRGLVGCWNYVAKQAGLQRTGKSCRLRWINYLRPGLKRHPISRQEEQLIIELQSILGNRWSQIAAQLPGRTDIEIK

SEQ ID NO: 2172 - protein, 155 aa, Pinus radiata
QQLESSRIKLKQIEQELERVKQQGISINGHLGDHNGSGAAAFDMEYGRWVEEQNRQARELRASLQAHLTDSELCVLVDNAIAHYDELFRMKGAASKLDVFHLMSGMWKTPTERCFMWMGGFRPSELLKILTPQIEPLTEQQSFAVSSLKLSSQQA

SEQ ID NO: 2173 - protein, 63 aa, Pinus radiata; identical to SEQ ID NO: 959

SEQ ID NO: 2174 - protein, 76 aa, Pinus radiata
RARKTEILVTEIEQLQRKEWILSEENAFLGKKFVHPHSVSKTPGSESGSIQNSEVETQLVMRPPCTNAHFLINSSH

SEQ ID NO: 2175 - protein, 161 aa, Eucalyptus grandis
RESANCASRVADRRENRRRRDMGNQKLKWTKEEEEALLAGIAKHGAGKWKNILKDPEFAPALVNRSNIDLKDKWRNLSVGTSGQGSRDKQRLSKVKSLMAAPQSSTVPLNPQAHAASTDVALVNSSNSFQDGKNYSLWVSVLLFLFSNGNLFYFYPLLSFL

SEQ ID NO: 2176 - protein, 31 aa, Eucalyptus grandis
TRQSARALLAIHDYFSRLRALSSLWLARPRE

SEQ ID NO: 2177 - protein, 191 aa, Eucalyptus grandis
MASRKEVDRIKGPWSPEEDEALRLLVQKHGPRNWSLISKSIPGRSGKSCRLRWCNQLSPQVEHRAFTPEEDDIIVRAHARFGNKWATIARLLSGRTDNAIKNHWNSTLKRKCSPPLSPLAEEGNNRAFDAAAGYDGDLSPRERPAKRSASAGPCLSPGSPSGSGMSDSSVHFVYRPVAKTGPVVPPTVEAT

SEQ ID NO: 2178 - protein, 113 aa, Eucalyptus grandis
QVAQLRVENSTLLKRLSDISQKYNVAAVDNRVLKADVETLRAKVKMAEETVKRVTGLNPMLHVMSDMSSVGVPPFDGSPSDTSADAAVPVRDDPKHQFYQTNSSNPASSADDM

SEQ ID NO: 2179 - protein, 314 aa, Eucalyptus grandis
MKRLGSSDSLGALMSICPPSEELQHSPRNGNPIYHSRDLQSMLELGLDEEGCVEDQSAGGGGHVGGEKKRRLSIDQVKALEKNFEVENKLEPERKVKLAQELGLQPRQVAVWFQNRRARWKTKQLERDYGVLKSSYEALKLSYDALKHDNEALHKEIKELKSKLREEDDNPESNLSVKEEVIIPGHDVSDKIRAADDGDDDTKRSPPPPITAPPRELSFNNGGLKDGSSDSDSSAIVNEENAATSSSSPNPAVQSHGGFLKFMGSSSSSASPPPSPPASFGGCFSFQFQRAYQPQPQPPHHHHHHSPYVKMEEH

SEQ ID NO: 2180 - protein, 94 aa, Eucalyptus grandis
ERYKSACSDSSHPQSVSDVNTQFYQQEASKLRRQIREIQVSDRHLLGEGISDLSFKDLKNLESKLEKSISRVRSKKNEMLFAEIEYMQKRGLVQ

SEQ ID NO: 2181 - protein, 83 aa, Eucalyptus grandis
ENKINRQVTFAKRRNGLLKKAYELSVLCDAEVALIIFSTRGKLYEFCSSPSMLKTLDRYQKCSYGSVEVNKPSKELENAYREY

SEQ ID NO: 2182 - protein, 108 aa, Eucalyptus grandis
MGRGKIEIQKIENDTNRQVTYSKRRNGIFKKAHELTVLCDARVSILMLSGNKKLHEYISPTTTTKRMIDDYQKALGIDLWTTHYDRMQEELRKLKEVNNNFRKEIRQI

SEQ ID NO: 2183 - protein, 40 aa, Eucalyptus grandis
RNLMGEDLGTLNSKELEQLERQLEASLKHIRSTKTQCMLD

SEQ ID NO: 2184 - protein, 161 aa, Eucalyptus grandis
MVFPTQATPEESPQRKMGRGKIEIKRIENTTNRQVTFCKRRNGLLKKAYELSVLCEAEVALIVFSSRGRLYEYANDSVKATIERYKKACSDSSSSGSVSEANVQFYQQESAKLQQQINNMQNNNRQLVGDSIAGMNMKDMKTTEQKLEKAIAKIRAKKNAI

SEQ ID NO: 2185 - protein, 92 aa, Eucalyptus grandis
QHKEQMLVEANRELRKKLEESNTRIPLRLGWEAEDHNNISYSRLPMQSQGLIFQPLGGNPTLQIGYNPAGSNELNVSAADQHPNGFIPGWML

SEQ ID NO: 2186 - protein, 113 aa, Eucalyptus grandis
GSKELESLERQLDGSLKQIRSRRTQYMLDKLTDLQHREQLLHEANRTLNQRLMEGYQVNALQLNQHAEEVGGYGHPPPPPLPPQPLAQPHSEAFFNPLECEPTLQMGYQPDPV

SEQ ID NO: 2187 - protein, 309 aa, Eucalyptus grandis
MTRRCSHCCNKGHNSRTCPVRGGGGDGGGAAAAPSSSSPSTSSSGAAAAAAASASGGGVKLFGVRLTDGSIMKKSASVGCLSAAHYHSSSSAAASPNPGSSPIDGSDGYLSDDPAPGSRSSNRRVERKKGNPWTEEEHRRFLIGLQKLGKGDWRGIARDFVTTRTPTQVASHAQKYYIRQSNAGRRKRRSSLFDMAPDMATADQPSHPEETFLPPLVRLNDDTNSTTSTSMGLDLERTPMETSHPETSEGGGDVAMESIDQVPLVPCYFPYYLPLPFPMWPPNMAPPEDGRVVETSHHRVLKPIPVIPK

SEQ ID NO: 2188 - protein, 123 aa, Eucalyptus grandis
WDTSSSPPTLLESVDNFILSPARTGKAESECLSPRNSGLLDALVHESKTMSSAKNNSPEKSTNSSALTPGDISSSTLDICKSEWEEYGDPISPPGHSATSVFNGCTPLSTSGSSLDEQPYPDT

SEQ ID NO: 2189 - protein, 136 aa, Eucalyptus grandis
HIRRKLLNRGIDPATHRPLNEPAQDATTISFAAAPSKQEPRDDAIAAALGYKNENNPTTTAATVQEKCPDLNLELRISPPCQQQHQPDASMGMVEGNHCFACSLGLQNSKECSCRRGASGGSSAHGGYDFLGLKTS

SEQ ID NO: 2190 - protein, 109 aa, Eucalyptus grandis
MEFPSEFSEASSQKRIGGRGKIEIKRIENTTNRQVTFCKRRNGLLKKAYELSVLCDAEVALIVFSSRGRLYEYANNSVRGTIERYKKASSDSSTSHSPFPEVEHSSFIQ

SEQ ID NO: 2191 - protein, 116 aa, Eucalyptus grandis
MGRGRVELKRIENKINRQVTFSKRRNGLLKKAYELSVLCDVEVALLIFSSRGKLYEFGSAGPSGINKTLERYQRDNFTPQDNVAEHETQQNWFQEISKLKAKYELFNKLQKHLLGK

SEQ ID NO: 2192 - protein, 98 aa, Eucalyptus grandis
MARGKVQMKRIENPVHRQVTFCKRRAGLLKKAKELSVLCDADIGLFIFSPHGKLYELATKGTMKGLIERYMKTTQSQAALTEEATPSQPLDAKEEINI

SEQ ID NO: 2193 - protein, 198 aa, Eucalyptus grandis
MGRGKVELKRIENKINRQVTFAKRRNGLLKKAYELSVLCDAEVALIIFSNRGKLYEFCSSSSMMKTIEKYQKCSYGSLETNCSINEMQNSYQDYLKLKTRVEVLQRSQRNLLGEELGPLNSKELEQLEHQLENSLKQIRSAKTQFMFDQLAHLQHKEQMLVEANRELRKKLEESNTRIPLRLGWEAEDHNNISYSRLP

SEQ ID NO: 2194 - protein, 153 aa, Eucalyptus grandis
MRKPCCDKRDTNKGAWSKQEDQKLIDYIQKHGEGSWRTLPQAAGLLRCGKSCRLRWINYLRPDLKRGNFAEDEEDLIIKLHALLGNRWSLIAGRLPGRTDNEVKNYWNSHLRRKLLKMGIDPNNHRLNQNLPRSQTRMPRQHFLIQYEDHMTL

SEQ ID NO: 2195 - protein, 104 aa, Eucalyptus grandis
EALQQSLVDTLSSTTLSPTGSGNVAEYMGQMAIAMGKLATLENFVHQADLLRQQTLQQMHRILTTRQAARALLVINDYISRLRALSSLWLARPRTENICSAKLF

SEQ ID NO: 2196 - protein, 25 aa, Eucalyptus grandis
DPLMKPWQIPCPIQPIIASADLFEC

SEQ ID NO: 2197 - protein, 87 aa, Eucalyptus grandis
MGRRKIEIQPITHERNRSVTFLKRKNGLFKKAYELGVLCSVDVAVIIFEDRPGHSPKLYQYSSRGIQDIVQRHLHHDGETDNRGPGD

SEQ ID NO: 2198 - protein, 107 aa, Eucalyptus grandis
RDRTFLVGLEKLGKGDWRGISRSYVTTRTPAQVASHAQKYFLRQVSFNKKKRRSSLFDMVKNQCSYKLLPSYRLSSISLMGFDKFLLYKVDVKTAAGDRLGSLTAKP

SEQ ID NO: 2199 - protein, 107 aa, Eucalyptus grandis
MTLEEFLVRAGVVREDTQMMARPGDNGVHEEMSQFTSNGLASSAAAGNDFIFSSKPAGSSLDFIGTRPTQLQQQPQPQPLEPPAPLFPKPETVSFATSVHLPNTASY

SEQ ID NO: 2200 - protein, 150 aa, Eucalyptus grandis
ANAPLRIAMNSNASSNPQSMATSTTSATTPAAGGDGGKKVRKPYTITKSRESWTEEEHDKFLEALQLFDRDWKKIEDFVGSKTVIQIRSHAQKYFLKVQKNGAVAHVPPPRPKRKAAHPYPQKASKNVLVPLQASMAQPSSTNPAFTITP

SEQ ID NO: 2201 - protein, 171 aa, Eucalyptus grandis
MGRSPCCESEHMNKGAWSKEEDERLIAYIKRHGEGCWRSLPKAAGLLRCGKSCRLRWINYLRPDLKRGNFSDEEDELIITLHSLLGNKWSLIAARLPGRTDNEIKNYWNTHIKRKLHARGIDPQTHRPLRLHQHCWCWCCCHFTLSVLTLTTAATRPRLTRRLVKNYHHHQ

SEQ ID NO: 2202 - protein, 98 aa, Eucalyptus grandis
MNSPLAQLVNPRRMHTYEPFDQFPMWGDTFKADKVKNLEASSSVIVHAVDDGLDKKFEYVSHESAENSSSRSDQEANRPDKVQRRLAQNREAARKSRL

SEQ ID NO: 2203 - protein, 111 aa, Eucalyptus grandis
MNSPLAQLVNPRRMHTYEPFDQFPMWGDTFKADKVKNLEASSSVIVHAVDDGLDKKFEYVSHESAENSSSRSDQEANRPDKVQRRLAQNREAARKSRLRKKKYVQQLESSR

SEQ ID NO: 2204 - protein, 162 aa, Eucalyptus grandis
MASSSSVASARKDADRIKGPWSPEEDEALQRLVQSYGPRNWSLISKSIPGRSGKSCRLRWCNQLSPQVEHRPFTPEEDEAIVRAHARFGNKWATIARLLNGRTDNAVKNHWNSTLKRKCSSTCSAGGDDADALAEQQPLKRSASLGTPTGGNNAVSDLFFSP

SEQ ID NO: 2205 - protein, 92 aa, Eucalyptus grandis
MAKEKIKIKKIDNLTARQVTFSKRRRGLIKKAEELSVLCDADVSLIVFSATGKLYDFSSSRQMKGEDLEGLNVEELDQLEKKLEAGLSLVIK

SEQ ID NO: 2206 - protein, 148 aa, Eucalyptus grandis
MRKPDASGKNSSNSNANKLRKGLWSPEEDDKLMNYMLNNGQGCWSDVARNAGLQRCGKSCRLRWINYLRPDLKRGAFSPQEEELIIHLHSILGNRWSQIAARLPGRTDNEIKNFWNSTIKKRSRTRHHLLVDTRQTRAILLASDVKDV

SEQ ID NO: 2207 - protein, 73 aa, Eucalyptus grandis
APEIAPPLAAPRGGHHRRAHSEVNFRIPEDLDLGPDPFENGPSGSFEDFGSEDDLLSTYMDIEKFGSSSTRAG

SEQ ID NO: 2208 - protein, 147 aa, Eucalyptus grandis
SENVSGGAIERPRATGKLAAPVNSPSMSSSLDLKNSCMDANANPVSILQPGVVPPEAWLQVMSLCGRLLKIFPWKASTSVLSAVSSSCSLQYHRLCFSKFALCKNERELKRERRKQSNRESARRSRLRKQAETEELGKKVDSLSAEN

SEQ ID NO: 2209 - protein, 115 aa, Eucalyptus grandis
FFLYIISLFLVRENSERSREGTSSNGDGKSEVQGKVAGEVDAASENVSGGAIERPRATGKLAAPVNSPSMASSLDLKNSCMDANANPVSILQPGVVPPEAWLQNERELKRERREQ

SEQ ID NO: 2210 - protein, 192 aa, Eucalyptus grandis
MGRQPCCDKSGVKKGPWTAEEDKKLINFILTNGHCCWRAVPKLAGLRRCGKSCRLRWTNYLRPDLKRGLLSEAEEQLVIDLHARLGNRWSKIAARLPGRTDNEIKNHWNTHIKKKLLKMGIDPVTHEPLNKPQKTPSEHDPEASLSSSQADPTSESPANTHQPNNAHADEVQLVLVLPVGLVRRELLLRQGR

SEQ ID NO: 2211 - protein, 89 aa, Pinus radiata
LSRNMDDVFVQRCNRNFTARDRLISKERRNFGWVCGVTEEEEELIIRMYKLVGNRWSLIAGRLPGRKAEEIERYWKMRSINAAPLKPNT

SEQ ID NO: 2212 - protein, 237 aa, Pinus radiata
MVKELLMMCSNCGHSGHSSRACPDRGSVKLFGVRLIATDDGMACMRKSLSMGNLGHYRSLYNVNHCSGTSECGSADQDGYLSDGFVHSSSNARERKKGVPWSEEEHRMFLYGLEKLGKGDWRGISRNFVTTRTPTQVASHAQKYFLRQSNLNKRKRRSSLFDMCPHDSHVTSSFRREDSLGNLYEFSPKHSALGVSPNFELYSFGVSPTLSLGRSLQPVEAVLEEKAAHYHPVNSEE

SEQ ID NO: 2213 - protein, 55 aa, Pinus radiata
WLQLCSGIDEHAAGFCSQLVFAPIDASFADDAPLAPSGFRVIPLESGSECFSSKT

SEQ ID NO: 2214 - protein, 119 aa, Pinus radiata
GVLKFPCFDLITMNLMESFEAKGKGEKRRTVRGKTQLKRIENGTSRQVTFCKRRNGLLKKAYELSVLCDAEVALIVFSPRGKLYEFANPSMQKMLERYEKCSEGSNPTSTAKEQDVQCL

SEQ ID NO: 2215 - protein, 146 aa, Pinus radiata
PKQDQKLVTYIQEHGHGSWRALPQKAGLLRCGKSCRLRWANYLRPDIKRGKFTVQEEQTIIQLHALLGNRWSAIATHLPKRTDNEIKNYWNTHLKKRLLQMGIDPVTHKPKSESIMVPGVQSSNGSSNLSHMAQWESARLEAESKA

SEQ ID NO: 2216 - protein, 106 aa, Pinus radiata
GIFIGGSCVGGDQSHSMSGNGALAFDMEYARWLDEHHRQINELRSAVNSHVGDNELRGLVEGVMGHYDEIFRLKTVASKADVFHLVSGMWKTPAERCFMWMGGFRP

SEQ ID NO: 2217 - protein, 114 aa, Pinus radiata; identical to SEQ ID NO: 937

SEQ ID NO: 2218 - protein, 126 aa, Pinus radiata
WNLIEEKIEGRSGKSCRLRWFNQLDPRINRRPFTEEDEEKLLAAHRLYGNKWAMIARLFPGRTDNAVKNHWHVIMARRYREQSSAFGRRKLPQVHRREKRACTDDETRMGSSSCNMWVDKYSSLKS

SEQ ID NO: 2219 - protein, 123 aa, Pinus radiata
LIAYIRANGEGSWRSLPKAAGLPRCGKSCRLRWINYLRPDLKRGSFTEEEDELIIKLHSVVGNKWSLIAGRLPGRTDNEIKNYWNTHIKRKLLIKGIDPQSHRPLGQPYSSNNMPVSRLFLTS

SEQ ID NO: 2220 - protein, 176 aa, Pinus radiata; identical to SEQ ID NO: 926

SEQ ID NO: 2221 - protein, 119 aa, Pinus radiata
LYQCQALFENGAVEKLSRTYNDLYDDLKEEILSWLPVECVCRFRSVSKQWNNLLSSHNFIKKVWRKKPANMNPWLVLHPVNSSYCLAYCFFTRTWKTTSSISIENANNYGENGILGISC

SEQ ID NO: 2222 - protein, 124 aa, Pinus radiata
DKKLINFLTTHGQCCWRTVPELAGISRCGKSCRLRWTNYLRPDLKRGVFSESEEKLILDLHSRVGNRWSKIASFLPGRTDNELKNYWNTHIKKKLKRMGLDPGDAQAISETLPQPAPVAENNDV

SEQ ID NO: 2223 - protein, 175 aa, Pinus radiata
MKGKSPGHDEPDRIKGPWSPEEDAALQHFVQKYGPRNWSLISKAIPGRSGKSCRLRWCNQLSPQVEHRPFTPEEDATIVRAHAQHGNKWATIARMLSGRTDNAIKNHWNSTLRRRCQGGGALVIDDEISSGADGFRKRNLSEDADASRKFKKLSLGTTTTTTTTEPSTSSASDRS

SEQ ID NO: 2224 - protein, 103 aa, Pinus radiata
MSSRSCSLCGLNGHNSRTCVGSGVMLFGVRLTDGPMRKSASMNNLSNLSQYEHSDPAEVAAEGFDGYVSDDLVHSSSNARERKRGVPWTEEEHRMFLVGLQRV

SEQ ID NO: 2225 - protein, 96 aa, Pinus radiata
MSSRSCSLCGLNGHNSRTCVGSGVMLFGVRLTDGPMRKSASMNNLSNLSQYEHSDPAEVAAEGFDGYVSDDLVHSSSNARERKRGVPWTEEEHRMF

SEQ ID NO: 2226 - protein, 131 aa, Pinus radiata
RGRVQLRRIENKISRQVTFSKRRNGLMKKAAELSILCDAEVALIVFSNKDKLYEFASSSMTKILERYRKRSNLIQDIGKDPQNSDIELTRLKEEVDRLQRSRRHLLGEDLHQLGATDLQHLEQQLEEALQK

SEQ ID NO: 2227 - protein, 49 aa, Pinus radiata
MPSIMEKQNSGEDSDSKGQLDNGKYVRYTNEQVETLERAYNECSKPSTR

SEQ ID NO: 2228 - protein, 128 aa, Pinus radiata; identical to SEQ ID NO: 980

SEQ ID NO: 2229 - protein, 181 aa, Pinus radiata
EDLDDCIHPPEKKRRLTADQVQFLERSFEIENKLEPERKIQLAKELGLQPRQVAVWFQNRRARWKTKQLERDYDILKSRYENLRVDYDSLLKEKDKLRAEVTFLTDKLHDSDHEALTKDSESADKKVYPQPASHSDCVGEPERSTAAKDTPPGCKHEDLLSSGTDSSGVLDEDSPHHVDCG

SEQ ID NO: 2230 - protein, 107 aa, Pinus radiata
MGRSPCCEKAHTNKGAWTKEEDDRLIAHIRTHGEGCWRSLPKAAGLMRCGKSCRLRWINYLRPDLKRGNFSEEEDELVIKLHSLLGNKWSLIAGRLPGRTDNEIKNY

SEQ ID NO: 2231 - protein, 125 aa, Pinus radiata
KKGVPWTEEEHRQFLMGLRKYGKGDWRSISRNFVVSRTPTQVASHAQKYYIRLGSDNKNKRRSSIHDITTVHGTDRMPSPLLHVSNRQTNSPSTQAEMNHSPCLDISISDFTRTSNKLFGTSNRW

SEQ ID NO: 2232 - protein, 150 aa, Pinus radiata
MTRKCSHCGNNGHNSRTCPNRGGVKLFGVRLTDGPIRKSASMGNLMMMSNPSSPADPSEPASAAAAAAAAAASGYLSDGLVEASTSSNSRERKKGVPWTEEEHRMFLLGLQKLGKGDWRGIARNFVITRTPTQVASHAQKYFIRQSNMTR

SEQ ID NO: 2233 - protein, 102 aa, Pinus radiata
MKMSLPSNVLTLSADSNSNSNSISSSGDELAAKVRKPYTITKQRERWSEDEHLKFLEALKMYGRAWRRIEEHIGTKTAVQIRSHAQKFFSKLVRGSSNKGVS

SEQ ID NO: 2234 - protein, 85 aa, Pinus radiata
GIDMNRGPATNESEYSSVFQADALRTIDTGSVVVKRERERTFELEAERDRTCDVSSRTSDEEEIGSTRKKLRLSKEQSALLEESF

SEQ ID NO: 2235 - protein, 115 aa, Pinus radiata
NLESLTLKELQQLEKQLGRAIKKIYNKKMKIISQCCKSLSEKVRSLEEENSELLTKLIPRADSSTSGAALFVDTSMPKSHSATEAWRQLLQRVLVTAAKMATTPPARHSNSRPNH

SEQ ID NO: 2236 - protein, 88 aa, Pinus radiata
GKATSGSANEAMSQSGDSGSDGSSEGSEEYNTQTESQVARKRSFDQMIVDGANAQSTNIQSYNSQAGEPYVTSGGHAMGNPISQAVAA

SEQ ID NO: 2237 - protein, 66 aa, Pinus radiata
QLKWKERILTEENLFLRKKCGDEHVDCSAFRTPPAQLRSIQNIDVETQLVIRPPTVQQHPDVDSPR

SEQ ID NO: 2238 - protein, 176 aa, Pinus radiata
MGRTPCCLKVGLNRGPWTPEEDLCLSNYIEAHGEGGWRTLPKKAGLLRCGKSCRLRWMNYLRPDVKHGHILPEEEDLILRLHRLLGNRWSLIAGRMPGRTDNEVKNYWNTHLSKKLISQGIDPRTHKPLSESEDICSSPGNSEVSRKSQRENNAEIPRKVADGAVDIQDKEEDITE

SEQ ID NO: 2239 - protein, 105 aa, Pinus radiata; identical to SEQ ID NO: 924

SEQ ID NO: 2240 - protein, 78 aa, Pinus radiata
MSNGRLCEDLDRIKGPWSPEEDASLQRLVQKYGPRNWTLISKGIPGRSGKSCRLRWCNQLSPQVEHRPFTPSEDAAIL

SEQ ID NO: 2241 - protein, 67 aa, Pinus radiata
MGRALGRTEIKRIENEVSRNVSFRKRRRGLLKKAAELSILCDATVGVVVFSPAGKLSEYASTSEQMD

SEQ ID NO: 2242 - protein, 131 aa, Pinus radiata
IRNPTNRHSSFYKRKGGLLKKAFELAVLCDAEVALIIFSETGRIYEFASHDDVTTVLAKYRIQTKTAGNAMPSSLQKTEFDQLQVRMLQEKIDNLEKTKKHMVGDNLESLTWKELQQVEKKLSKATKIIVA

SEQ ID NO: 2243 - protein, 29 aa, Pinus radiata
QPVAPESIVPPHQPPHNQTPNQYMQGWWV

SEQ ID NO: 2244 - protein, 107 aa, Pinus radiata; identical to SEQ ID NO: 2156

SEQ ID NO: 2245 - protein, 168 aa, Pinus radiata
TAEEDRKLVNFITLHGHGCWREVPKLAGLLRCGKSCRLRWTNYLRPDLKRGLLSESEEKLIIDLHAAIGNRWSRIAAQLPGRTDNEIKNYWNTRIKKKLRQMGIDPVTHKPLTQMQMQSTPAQTLLLQENDTEQQQQEQHNEPDPDQNQSSNGTVETLVSRAREPHDH

SEQ ID NO: 2246 - protein, 164 aa, Pinus radiata
SDGTTTMSTYERKASLREFYAVIYPSLLQLEGGITEMEDNKQKLICKERYKKRVDEERRHLSELDLEREKECGICMETQTKVVLPNCSHAMCLNCYREWHARSESCPFCRDSLKRVNSTDLWIFTSNEEVVDMETLGRENLKRLFNYIDKLPLIVPESLFYVYD

SEQ ID NO: 2247 - protein, 414 aa, Pinus radiata
MGRHSCCYKQKLRKGLWSPEEDEKLLRHISQYGHGCWSSVPKQAGLQRCGKSCRLRWINYLRPDLKRGAFSQDEEDLIIELHAALGNKWSQIAANLPGRTDNEIKNLWNSCLKKKLRQRGIDPVSHRPLSEVENSDDKDATSGQTQDKVSRGSVELLSQLNPQFSSSTTARSSKNSNLMAPTLSKDTVADGFVSNHQENSMMNSCISDFVDNFSLQQLNYSSSDSRFSNLCFTQTGRAHGNTIFSDFNSNVISAISPPSSNSLFPTASMGFNFKPSNAVPSANSTSSASTGTADFHNSGSYFGNSLVSWGLLADCGSPDKEGSTSIHPLEVHQPGDFKWAAEYLQNPLFMAAALQNQAQEQSNLYNQIKPETQFPPDHSTTSMWDHLQGHESLDNSLNTCGKDIQRLTALLGHN

SEQ ID NO: 2248 - protein, 205 aa, Pinus radiata
MRYPAPAPASRGKSTSTATPCCSKVGIKRGPWTPEEDEVLASYVRREGEGRWRTLPKRAGLQRCGKSCRLRWMNYLRPSVKRGQIAPDEEDLILRLHRLLGNRWSLIAGRIPGRTDNEIKNYWNTHLSKKLISQGIDPRTHKPLLNHNPSSSLAAHLQDTYNASTFTPKATYPNPTVPVEETGDENDLKVGRQPAGSASKRGRCQ

SEQ ID NO: 2249 - protein, 195 aa, Pinus radiata
MDKKPDDDSGKSQDVEVRKGPWTMEEDLILINYIANHGEGSWNSLAKAAGLKRTGKSCRLRWLNYLRPDVRRGNITTEEQLLIMELHAKWGNRWSKIAKHLPGRTDNEIKNFWRTRIQKHIKQAEAFSGQSSEMSDQASTSHMSSMPEPMETYDSPPSFQGNNNMEPLPVNLSVESNEAYWSMDDLWSMQLLNGD

SEQ ID NO: 2250 - protein, 208 aa, Pinus radiata
MDKKPCYRTQDPQVRKGPWTLEEDLILMDYIANHGEGVWNSLAKAAGLQRTGKSCRLRWLNYLRPDVRRGNITPEEQLLIIHLQSMWGNRWSEIAKHLPGRTDNEIKNYWRTKIQKHIIKQSETEINDLTIPPSSANACTDHRGVSAANTIEIACSPPSDQGGSGETMLSALPPAQEPNDSACWSVEDLWPIQSLISGMGDDAQYYSV

SEQ ID NO: 2251 - protein, 147 aa, Pinus radiata
MNSTTTQFVSSRRMGMYDPIHQIGMWDENFKQNGNPNAPPALIIPMHANLDNQSEDTSHGSQDTAGKYEQETSKPYDKVQRRLAQNREAARKSRLRKKAYVQQLEASRLKLMQLEQEVDRARQQGVYMASGVDSAYPGYGGCLNSGI

SEQ ID NO: 2252 - protein, 43 aa, Pinus radiata; identical to SEQ ID NO: 611

SEQ ID NO: 2253 - protein, 54 aa, Pinus radiata
MGRSPCCEKAHTNKGAWTKQEDDRLIAHIRAHGEGGWRSLPKAAGCLPALCFLN

SEQ ID NO: 2254 - protein, 66 aa, Pinus radiata
MGRAPCCEKVGLKKGPWTPEEDQKLVTYIQEHGHGSWRALPQKAGDYEFIFSSRTCKKFSVFLFFG

SEQ ID NO: 2255 - protein, 67 aa, Pinus radiata
MGRSPCCAKEGLNRGAWTKTEDIILSEYIRIHGDGGWRSLPKKAGLKRCGKSCRLRWLNYLRPDIKR

SEQ ID NO: 2256 - protein, 226 aa, Pinus radiata
MGRAPCCSNDDRNKGAWTKEEDDRLIQYIKVHGEGCWRSLPKAAGLLRCGKSCRLRWINYLRPDLKRGFFSEDEDDLILKLHALLGNNRWSLIAGRLPGRTDNEIKNYWNSHLKRKLISMGIDPLTHRPFQKTSHHHPSPPQNVREAETTPSIGIVQDFFRCPSELSTKSEQISDAASGLAQDEQPHPNLNLNLELSIARSSVHRVAEKEDVVNSQQGESNLSEGK

SEQ ID NO: 2257 - protein, 101 aa, Pinus radiata
MGRAPCCSNGDRNKGAWTKEEDDRLIQYIKVHGEGCWRSLPNAAGLLRCGKSCRLRWINYLCPDLKRGFFSEDEDDLILKLHALLGNKWSLIAGRLPGRTD

SEQ ID NO: 2258 - protein, 412 aa, Pinus radiata
MGRTPCCEKNIGLKKGPWTPEEDQKLIDYIQSHGHGSWRALPKRAGLLRCGKSCRLRWTNYLRPDIKRGQFSFEEEQTIIELHAVLGNKWSTIAGHLPGRTDNEIKNYWNTHLKKRLLQMGIDPVTHRPRTDLLAFSNIQSSIFNTPGFGHMAQWESARLEAEARLTGEYLRQALFMAGNGSATADLLMRPCKSEFGNDQFNLTKNMGNPPWIQQPGMALDYKGAVPQSLEQFLQTNVCSASDINGGGCLSHEGGFNITKFASPCSTLDGIQIKTEPQSLCGPQVVKNDSQFLHSEGDLRKQAMLDMNVGCNVLINMNAESKVSFGHNGIITDQEYNNLGQIDNNNHLSHAATTLWPVEGQLQAIASASMPGLISSTSCTSNNIYSQPGLIPLLNSTTSSMGDTNSYREAQP

SEQ ID NO: 2259 - protein, 391 aa, Pinus radiata
MGRTPCCLKVGLNRGPWTPEEDLCLSNYIEAHGEGGWRTLPKKAGLLRCGKSCRLRWMNYLRPDVKHGHILPEEEDLILRLHRLLGNRWSLIAGRMPGRTDNEVKNYWNTHLSKKLISQGIDPRTHKPLSESEDICSSPGNSEVSRKSQRENNAEIPRKVADGAVDIQDKEEDITEDQTSAQLPENQLLETSNSQCPSVATDFVPQAPSIPSTAYSFQQSTTSSVPGGVSDSVDVNHNKGSKQVPFPLSNTACFNSSAQGVAGDYLDQYLMKNLVTNSNDLITSTVRLSSALQTAPFVGQFDSNHVFMSGNASLNEKHQMPQNSQALEMDPHHSFIAHPSEEGTYDKLNHTRCAASDQVTSFNYPYLISHTVTGSALGDFNPDIFPPFVES

SEQ ID NO: 2260 - protein, 144 aa, Pinus radiata
MGRSPCCEKAHTNKGAWTKQEDDRLIAHIRAHGEGGWRSLPKAAGLLRCGKSCRLRWINYLRPDLKRGSFTEEEDELIIKLHSFVGNKWSLIAGRLPGRTDNEIKNYWNTHIKRKLLSKGLDPQTHRPLGQPNNTPVTRPVLEH

SEQ ID NO: 2261 - protein, 255 aa, Pinus radiata
MGRSPCCEKAHTNKGAWTKEEDDRLIAHIRTHGEGCWRSLPKAAGLMRCGKSCRLRWINYLRPDLKRGNFSEEEDELVIKLHSLLGNKWSLIAGRLPGRTDNEIKNYWNTHIKRKLLNRGLDPQSHRPLGQPHNSNTTCPSLPALEHEILVFQRPRTPEIADFFQYERSESSPMEPATSKDAEEHPDLNLDLCISLPVHSPPATSRASSVDGTVDSKPNSVSCHMGLQVNYGVQCENRYCEESASGVSSFYTLVL

SEQ ID NO: 2262 - protein, 162 aa, Pinus radiata
MGTGEMGTPAKTTKASTPQEQPPTSTAMLYPDWAAAFQAYYNSGTTPPPPPAYFHSSVASSPQPHPYMWGGQPLMPPYGTLPPPYAAMYHHGSMYAHPSMPPGAHPFAPYVMTSSLSTTEGAPVGTTSGADAEGKPSEPKDQTLLKRSKGSLGSLNMLTGKI

SEQ ID NO: 2263 - protein, 193 aa, Pinus radiata
MGCNQSKVESEEEVVKSKERKQFMKESVAARNAFAAAHSASITSLKNIGAALNDYGQGESKESLSQGHLPVPHIYGDPLPPAPPLPPLLPPPRPDEHPARPLERSASAPAIALQQQAEEDRNPEANAGASIPEGEEDEVEEEEDEHLVEVSHSVTSFNPPPRPPPSSSEPPPPPLPPLTNQWDFFDDNSYFER

SEQ ID NO: 2264 - protein, 128 aa, Pinus radiata; identical to SEQ ID NO: 941

SEQ ID NO: 2265 - protein, 181 aa, Pinus radiata
MGRGRVELKRIENKINRQVTFSKRRNGLLKKAYELSVLCDAEVALIIFSSRGKLYEFGSAGMLKTLERYQKCSYVLQDATVSDREAQNWHQEVGKLKARVELLQRSQRHLLGEDLGPLSIKELQQLERQLEVALTHVRSRKTQVMLEMMDELRRKERILQEVNKSLRKKLQEAEGQAFNAM

SEQ ID NO: 2266 - protein, 107 aa, Pinus radiata
MDLMESFEAKGKGEKRRTVRGKTQLKRIENGTSRQVTFCKRRNGLLKKAYELSVLCDAEVALIVFSPRGKRYEFANPSMQKMLARYENFSEGSKATSTAKEQDVQGL

SEQ ID NO: 2267 - protein, 134 aa, Pinus radiata; identical to SEQ ID NO: 945

SEQ ID NO: 2268 - protein, 138 aa, Pinus radiata; identical to SEQ ID NO: 931

SEQ ID NO: 2269 - protein, 141 aa, Pinus radiata
MGKKRVELKRIQNPSSRHATFSKRKNGLLKKAFELSVLCDAEVALIIFSETGKIYEFASNNDMAAILGKYRVHEEGTETSSPTSLQNVKYHESGLEKLQEKLTALQKKEKNLIGEDLEVLTMKELQRLEKQLQIGIKRLVI

SEQ ID NO: 2270 - protein, 135 aa, Pinus radiata
MGKKKVEVKLIQNPTSRQGCFYNRKCGLLKKAFELSVLCDAEVALIIFSQTGKIYEFASHDDVNAILAKYRIQTGTTTNAMPSSLQNTEPETLHEETNMLGKRKKVEKLHEKINMLEKRGKNMVGENLESLTVNE

SEQ ID NO: 2271 - protein, 118 aa, Pinus radiata
MARGKTQMKKIENVTSRQVTFSKRRNGLLKKAFELSVLCDAEVGLIVFSPSGKLYEFSRPCMGKLLEKYEKNSRESGINNAAKEKDTQHSKREIANMEEKIRILESTERKMLGQNLAS

SEQ ID NO: 2272 - protein, 147 aa, Pinus radiata; identical to SEQ ID NO: 971

SEQ ID NO: 2273 - protein, 113 aa, Pinus radiata
MGRGKIEIKKIENSVHRQVTFCKRRGGLMKKAYELSVLCDADVALIVFSSRGKLYELGTSNNNNNSMRSILERYQKCSQTAKHMNFSNNTSDEKMKQEINLLKQQIGSAKLTN

SEQ ID NO: 2274 - protein, 97 aa, Pinus radiata
SWKANPCTVPSSRIGGFGGGQVILPLAHTVEHEEFLEVIKLENHGLTQEEALLSRDMFLLQLCSGLDENAVGACAELVFAPIDASLADSSPLLPSGF

SEQ ID NO: 2275 - protein, 157 aa, Pinus radiata
SVDVLTAFSTGNGGTIELLYMQMYAPTTLASARDFWTLRYTSVLEDGSLVVCERSLSGTQGGPSMPAVQQFVRAEMQPSGYLIRPCEGGGSLIHIVDHMDLEPWSVPEVLRPLYESSTVLAQKVTMSALRHLRQIAQEASSDVVLGWGRQPAALRTF

SEQ ID NO: 2276 - protein, 327 aa, Pinus radiata
MVSVNPNPAQGFYFFDPANTRIHGVNAGSAAEGGGAAPPYAEDPSKKVRKPYTITKSRESWTEQEHDKFLEALHLFDRDWKKIEAFVGSKTVIQIRSHAQKYFLKVQKNGTSEHVPPPRPKRKAAHPYPQKAPKAPVVSQVNGPFQVSSAFLEPGHIVRPDGSALLGNSRTSVALSSWSHNSVPAMSASQGTKDVGISGPPVPSNCCNSSSNDSTPRSWPNAQAIEPLDQQKHLRVMPDFAQVYRFIGSVFDPDAGGHLQRLKQMDPINLETVVLLMKNLSANLTSPEFEKYQHGLFASYEGGPEKSKSGGSFKLLPEKSGSLILSA

SEQ ID NO: 2277 - protein, 225 aa, Pinus radiata
MGRSPCCEKAHTNKGAWTKQEDDRLIAHIRAHGEGGWRSLPKAAGLLRCGKSCRLRWINYLRPDLKRGSFTEEEDELIIKLHSFVGNKWSLIAGRLPGRTDNEIKNYWNTHIKRKLLSKGLDPQTHRPLGQPNNTPVTRPVLEHEIPAFQNPATPEIADLLQHHRLESSPIKPAASDAEEHPDLNLNLCISLPSNSAPAVNRVSSVDTTVDSNSNSGDGLCWQFL

SEQ ID NO: 2278 - protein, 69 aa, Pinus radiata
MLLQNVPPALLVRFLREHRSEWADCNIDAYSSATMKANAYNVPGSLGGITGSQVILPLAHTVEHEEFLE

SEQ ID NO: 2279 - protein, 65 aa, Pinus radiata
MARFPRVDKSNSKKTVKKGAWSAEEDQKLVAYIKRYGIWNWTHMAEPAGLARTGKSCRLRWMNYL

SEQ ID NO: 2280 - protein, 39 aa, Pinus radiata
PNIKHGNITQEEEEIIINLHRVLGNRWASIASRLSGRTD

SEQ ID NO: 2281 - protein, 59 aa, Pinus radiata
RKPCCDKQDTNKGAWSKQEDQKLIDYIRKHGEGCWRTLPKAAGLLRCGKSCRLRWINYL

SEQ ID NO: 2282 - protein, 48 aa, Pinus radiata
PDLKRGNFAEDEEDLIIKLHALLGNRWSLIAGRLPGRTDNEVKNYWNS

SEQ ID NO: 2283 - protein, 19 aa, Pinus radiata
CCSKKAVKRGFWSPEEDLK

SEQ ID NO: 2284 - protein, 45 aa, Pinus radiata
WTREEDNLLIHSITCHGEGRWNMLAKSAGLKRTGKSCRLRWLNYL

SEQ ID NO: 2285 - protein, 57 aa, Pinus radiata
RPDIKRGNLTPQEQLMILELHHKWGNRWSKIAQYLPGRTDNEIKNYWRTRVQKQARQ

SEQ ID NO: 2286 - protein, 57 aa, Pinus radiata
MASRKEVDRIKGPWSPEEDEALRLLVQKHGPRNWSLISKSIPGRSGKSCRLRWCNQL

SEQ ID NO: 2287 - protein, 68 aa, Pinus radiata
SPQVEHRAFTPEEDDIIVRAHARFGNKWATIARLLSGRTDNAIKNHWNSTLKRKCSPPLSPLAEEGNN

SEQ ID NO: 2288 - protein, 61 aa, Pinus radiata
MGRHSCCYKQKLRKGLWSPEEDEKLLRYITQYGHGCWSSVPKLAGLQRCGKSCRLRWINYL

SEQ ID NO: 2289 - protein, 78 aa, Pinus radiata
GSSPIDGSDGYLSDDPAPGSRSSNRRVERKKGNPWTEEEHRRFLIGLQKLGKGDWRGIARDFVTTRTPTQVASHAQKY

SEQ ID NO: 2290 - protein, 53 aa, Pinus radiata
KKGNPWTEEEHRRFLIGLQKLGKGDWRGIARDFVTTRTPTQVASHAQKYYIRQ

SEQ ID NO: 2291 - protein, 59 aa, Pinus radiata
RKPCCDKRDTNKGAWSKQEDQKLIDYIQKHGEGSWRTLPQAAGLLRCGKSCRLRWINYL

SEQ ID NO: 2292 - protein, 65 aa, Pinus radiata
PDLKRGNFAEDEEDLIIKLHALLGNRWSLIAGRLPGRTDNEVKNYWNSHLRRKLLKMGIDPNNHR

SEQ ID NO: 2293 - protein, 54 aa, Pinus radiata
MGRSPCCEKAHTNKGAWTKEEDQRLIDYIRLHGEGCWRSLPKSAGLLRCGKSCR

SEQ ID NO: 2294 - protein, 65 aa, Pinus radiata; identical to SEQ ID NO: 2279

SEQ ID NO: 2295 - protein, 40 aa, Pinus radiata
RPNIKHGNITQEEEEIIINLHRVLGNRWASIASRLSGRTD

SEQ ID NO: 2296 - protein, 41 aa, Pinus radiata
RKGVPWTEEEHRTFLMGLEKMGKGDWRGISRNYVTTRTPTQ

SEQ ID NO: 2297 - protein, 31 aa, Pinus radiata
RKGVPWTEEEHRTFLMGLEKMGKGDWRGISR

SEQ ID NO: 2298 - protein, 44 aa, Pinus radiata
EVRKGPWTEQEDFQLVCFVGLFGDRRWDFIAKVSGLKVAGENNR

SEQ ID NO: 2299 - protein, 61 aa, Pinus radiata
MGRSPCCESEHMNKGAWSKEEDERLIAYIKRHGEGCWRSLPKAAGLLRCGKSCRLRWINYL

SEQ ID NO: 2300 - protein, 67 aa, Pinus radiata
PDLKRGNFSDEEDELIITLHSLLGNKWSLIAARLPGRTDNEIKNYWNTHIKRKLHARGIDPQTHRPL

SEQ ID NO: 2301 - protein, 50 aa, Pinus radiata
KRGVPWTEEEHRLFLLGLQKVGKGDWRAISRNFVKTRTPTQVASHAQKYF

SEQ ID NO: 2302 - protein, 53 aa, Pinus radiata
KRGVPWTEEEHRLFLLGLQKVGKGDWRAISRNFVKTRTPTQVASHAQKYFLRR

SEQ ID NO: 2303 - protein, 64 aa, Pinus radiata
MASSSSVASARKDADRIKGPWSPEEDEALQRLVQSYGPRNWSLISKSIPGRSGKSCRLRWCNQL

SEQ ID NO: 2304 - protein, 98 aa, Pinus radiata
SPQVEHRPFTPEEDEAIVRAHARFGNKWATIARLLNGRTDNAVKNHWNSTLKRKCSSTCSAGGDDADALAEQQPLKRSASLGTPTGGNNAVSDLFFSP

SEQ ID NO: 2305 - protein, 50 aa, Pinus radiata
LRKGLWSPEEDDKLMNYMLNNGQGCWSDVARNAGLQRCGKSCRLRWINYL

SEQ ID NO: 2306 - protein, 60 aa, Pinus radiata
PDLKRGAFSPQEEELIIHLHSILGNRWSQIAARLPGRTDNEIKNFWNSTIKKRSRTRHHL

SEQ ID NO: 2307 - protein, 44 aa, Pinus radiata
KLDFSEDEETLVIRMYNLVGERWSLIAGRIPGRTAEEIEKYWNS

SEQ ID NO: 2308 - protein, 61 aa, Pinus radiata
MGRQPCCDKLGVKKGPWTAEEDRKLVNFILTHGQCCWRAVPKLAGLRRCGKSCRLRWTNYL

SEQ ID NO: 2309 - protein, 64 aa, Pinus radiata
PDLKRGLLNEAEESLVIDLHATLGNRWSKIAARLPGRTDNEIKNHWNTHIKKKLIRMGIDPVTH

SEQ ID NO: 2310 - protein, 61 aa, Pinus radiata
MGRQPCCDKSGVKKGPWTAEEDKKLINFILTNGHCCWRAVPKLAGLRRCGKSCRLRWTNYL

SEQ ID NO: 2311 - protein, 67 aa, Pinus radiata
PDLKRGLLSEAEEQLVIDLHARLGNRWSKIAARLPGRTDNEIKNHWNTHIKKKLLKMGIDPVTHEPL

SEQ ID NO: 2312 - protein, 50 aa, Pinus radiata
KKGVPWSEEEHRMFLYGLEKLGKGDWRGISRNFVTTRTPTQVASHAQKYF

SEQ ID NO: 2313 - protein, 53 aa, Pinus radiata
KKGVPWSEEEHRMFLYGLEKLGKGDWRGISRNFVTTRTPTQVASHAQKYFLRQ

SEQ ID NO: 2314 - protein, 60 aa, Pinus radiata
GKSPGHDEPDRIKGPWSPEEDAALQHFVQKYGPRNWSLISKAIPGRSGKSCRLRWCNQLS

SEQ ID NO: 2315 - protein, 60 aa, Pinus radiata
PQVEHRPFTPEEDATIVRAHAQHGNKWATIARMLSGRTDNAIKNHWNSTLRRRCQGGGAL

SEQ ID NO: 2316 - protein, 20 aa, Pinus radiata
KRGVPWTEEEHRMFLVGLQR

SEQ ID NO: 2317 - protein, 18 aa, Pinus radiata
KRGVPWTEEEHRMFLVGL

SEQ ID NO: 2318 - protein, 10 aa, Pinus radiata
KRGVPWTEEE

SEQ ID NO: 2319 - protein, 14 aa, Pinus radiata
KRGVPWTEEEHRMF

SEQ ID NO: 2320 - protein, 68 aa, Pinus radiata
MRCTRWQGLPFSSKPKVKKGLWSPEEDEKLINYMMKNGLLGCSWSYVAKQIGLQRCGKSCRLRWTNYL

SEQ ID NO: 2321 - protein, 62 aa, Pinus radiata
MGRAPCCDKANVKKGPWSPEEDTKLKAFIEQHGTGGNWIALPQKAGLKRCGKSCRLRWLNYL

SEQ ID NO: 2322 - protein, 60 aa, Pinus radiata
MGRSPCCEKAHTNKGAWTKEEDDRLIAHIRTHGEGCWRSLPKAAGLMRCGKSCRLRWINY

SEQ ID NO: 2323 - protein, 46 aa, Pinus radiata
RPDLKRGNFSEEEDELIIKLHSLLGNKWSLIAGRLPGRTDNEIKNY

SEQ ID NO: 2324 - protein, 61 aa, Pinus radiata
MGRAPCCEKVGLKKGPWTPEEDQKLLAYIQEHGHGSWRALPQKAGLLRCGKSCRLRWTNYL

SEQ ID NO: 2325 - protein, 61 aa, Pinus radiata
MGRSPCCEKAHTNKGAWTKEEDDRLIAHIRTHGEGCWRSLPKAAGLMRCGKSCRLRWINYL

SEQ ID NO: 2326 - protein, 45 aa, Pinus radiata
PDLKRGNFSEEEDELVIKLHSLLGNKWSLIAGRLPGRTDNEIKNY

SEQ ID NO: 2327 - protein, 50 aa, Pinus radiata
KKGVPWTEEEHRMFLLGLQKLGKGDWRGIARNFVITRTPTQVASHAQKYF

SEQ ID NO: 2328 - protein, 53 aa, Pinus radiata
KKGVPWTEEEHRMFLLGLQKLGKGDWRGIARNFVITRTPTQVASHAQKYFIRQ

SEQ ID NO: 2329 - protein, 48 aa, Pinus radiata
QRERWSEDEHLKFLEALKMYGRAWRRIEEHIGTKTAVQIRSHAQKFFS

SEQ ID NO: 2330 - protein, 42 aa, Pinus radiata
QRERWSEDEHLKFLEALKMYGRAWRRIEEHIGTKTAVQIRSH

SEQ ID NO: 2331 - protein, 61 aa, Pinus radiata
MGRTPCCLKVGLNRGPWTPEEDLCLSNYIEAHGEGGWRTLPKKAGLLRCGKSCRLRWMNYL

SEQ ID NO: 2332 - protein, 67 aa, Pinus radiata
PDVKHGHILPEEEDLILRLHRLLGNRWSLIAGRMPGRTDNEVKNYWNTHLSKKLISQGIDPRTHKPL

SEQ ID NO: 2333 - protein, 55 aa, Pinus radiata
CEDLDRIKGPWSPEEDASLQRLVQKYGPRNWTLISKGIPGRSGKSCRLRWCNQLS

SEQ ID NO: 2334 - protein, 56 aa, Pinus radiata
KGPWSPEEDASLQRLVQKYGPRNWTLISKGIPGRSGKSCRLRWCNQLSPQVEHRPF

SEQ ID NO: 2335 - protein, 34 aa, Pinus radiata
MGAPKQKWTSEEEGALRAGVEKYGAGKWQTILKD

SEQ ID NO: 2336 - protein, 51 aa, Pinus radiata
LRKGLWSPDEDIELTTYIMRKGLMGCWNYIAKQAGLQRCGKSCRLRWINYL

SEQ ID NO: 2337 - protein, 45 aa, Pinus radiata
PGLKRCAISPQEERLIIQLQSSLGNRWSQIAAHLPGRTDNEVKNY

SEQ ID NO: 2338 - protein, 62 aa, Pinus radiata
MGRSPCCEKAHTNKGAWTQQEDTRLVAHIRAHGQGGWSSLPKAAGLLRCGKSCRQRWINYLH

SEQ ID NO: 2339 - protein, 39 aa, Pinus radiata
PDLKRSNFSEEEDELIVRLHSLLGNKWSLIAGRLPGRTD

SEQ ID NO: 2340 - protein, 61 aa, Pinus radiata
GTHPAPSKPKLRKGLWSPVEDNQLTNYILRRGLVGCWNYVAKQAGLQRTGKSCRLRWINYL

SEQ ID NO: 2341 - protein, 43 aa, Pinus radiata
PGLKRHPISRQEEQLIIELQSILGNRWSQIAAQLPGRTDIEIK

SEQ ID NO: 2342 - protein, 61 aa, Pinus radiata
MGRHSCCYKQKLRKGLWSPEEDEKLLRHISQYGHGCWSSVPKQAGLQRCGKSCRLRWINYL

SEQ ID NO: 2343 - protein, 67 aa, Pinus radiata
PDLKRGAFSQDEEDLIIELHAALGNKWSQIAANLPGRTDNEIKNLWNSCLKKKLRQRGIDPVSHRPL

SEQ ID NO: 2344 - protein, 58 aa, Pinus radiata
TPCCSKVGIKRGPWTPEEDEVLASYVRREGEGRWRTLPKRAGLQRCGKSCRLRWMNYL

SEQ ID NO: 2345 - protein, 67 aa, Pinus radiata
PSVKRGQIAPDEEDLILRLHRLLGNRWSLIAGRIPGRTDNEIKNYWNTHLSKKLISQGIDPRTHKPL

SEQ ID NO: 2346 - protein, 67 aa, Pinus radiata
MDKKPDDDSGKSQDVEVRKGPWTMEEDLILINYIANHGEGSWNSLAKAAGLKRTGKSCRLRWLNYLR

SEQ ID NO: 2347 - protein, 56 aa, Pinus radiata
PDVRRGNITTEEQLLIMELHAKWGNRWSKIAKHLPGRTDNEIKNFWRTRIQKHIKQ

SEQ ID NO: 2348 - protein, 63 aa, Pinus radiata
MDKKPCYRTQDPQVRKGPWTLEEDLILMDYIANHGEGVWNSLAKAAGLQRTGKSCRLRWLNYL

SEQ ID NO: 2349 - protein, 54 aa, Pinus radiata
PDVRRGNITPEEQLLIIHLQSMWGNRWSEIAKHLPGRTDNEIKNYWRTKIQKHI

SEQ ID NO: 2350 - protein, 47 aa, Pinus radiata
SRESWTEQEHDKFLEALHLFDRDWKKIEAFVGSKTVIQIRSHAQKYF

SEQ ID NO: 2351 - protein, 59 aa, Pinus radiata
SWTEQEHDKFLEALHLFDRDWKKIEAFVGSKTVIQIRSHAQKYFLKVQKNGTSEHVPPP

SEQ ID NO: 2352 - protein, 45 aa, Pinus radiata
MGRSPCCEKAHTNKGAWTKQEDDRLIAHIRAHGEGGWRSLPKAAG

SEQ ID NO: 2353 - protein, 45 aa, Pinus radiata
MGRAPCCEKVGLKKGPWTPEEDQKLVTYIQEHGHGSWRALPQKAG

SEQ ID NO: 2354 - protein, 61 aa, Pinus radiata
MGRSPCCAKEGLNRGAWTKTEDIILSEYIRIHGDGGWRSLPKKAGLKRCGKSCRLRWLNYL

SEQ ID NO: 2355 - protein, 61 aa, Pinus radiata
MGRAPCCSNDDRNKGAWTKEEDDRLIQYIKVHGEGCWRSLPKAAGLLRCGKSCRLRWINYL

SEQ ID NO: 2356 - protein, 68 aa, Pinus radiata
PDLKRGFFSEDEDDLILKLHALLGNNRWSLIAGRLPGRTDNEIKNYWNSHLKRKLISMGIDPLTHRPF

SEQ ID NO: 2357 - protein, 61 aa, Pinus radiata
MGRAPCCSNGDRNKGAWTKEEDDRLIQYIKVHGEGCWRSLPNAAGLLRCGKSCRLRWINYL

SEQ ID NO: 2358 - protein, 39 aa, Pinus radiata
PDLKRGFFSEDEDDLILKLHALLGNKWSLIAGRLPGRTD

SEQ ID NO: 2359 - protein, 62 aa, Pinus radiata
MGRTPCCEKNIGLKKGPWTPEEDQKLIDYIQSHGHGSWRALPKRAGLLRCGKSCRLRWTNYL

SEQ ID NO: 2360 - protein, 66 aa, Pinus radiata
PDIKRGQFSFEEEQTIIELHAVLGNKWSTIAGHLPGRTDNEIKNYWNTHLKKRLLQMGIDPVTHRP

SEQ ID NO: 2361 - protein, 61 aa, Pinus radiata; identical to SEQ ID NO: 2331

SEQ ID NO: 2362 - protein, 67 aa, Pinus radiata; identical to SEQ ID NO: 2332

SEQ ID NO: 2363 - protein, 61 aa, Pinus radiata
MGRSPCCEKAHTNKGAWTKQEDDRLIAHIRAHGEGGWRSLPKAAGLLRCGKSCRLRWINYL

SEQ ID NO: 2364 - protein, 67 aa, Pinus radiata
PDLKRGSFTEEEDELIIKLHSFVGNKWSLIAGRLPGRTDNEIKNYWNTHIKRKLLSKGLDPQTHRPL

SEQ ID NO: 2365 - protein, 61 aa, Pinus radiata; identical to SEQ ID NO: 2363

SEQ ID NO: 2366 - protein, 67 aa, Pinus radiata; identical to SEQ ID NO: 2364

SEQ ID NO: 2367 - protein, 61 aa, Pinus radiata; identical to SEQ ID NO: 2325

SEQ ID NO: 2368 - protein, 67 aa, Pinus radiata
PDLKRGNFSEEEDELVIKLHSLLGNKWSLIAGRLPGRTDNEIKNYWNTHIKRKLLNRGLDPQSHRPL

SEQ ID NO: 2369 - DNA, 37 bp, Artificial Sequence
  Forward PCR primer
cgtctgtctagaaacaagctgaacatggacaagaagc

SEQ ID NO: 2370 - DNA, 31 bp, Artificial Sequence
  Reverse PCR primer
tggccttctagactagctctgaccagagaaa

SEQ ID NO: 2371 - DNA, 1239 bp, Eucalyptus grandis
atcgcccccgttctctccctctctctccctctcccccctaacgtttctggccctcttctttgtctggacaaaaagatgggaagaaagtgctctcgctgtgggaacataggccataactcaaggacttgcacaactttcatgggggcagcaagtgcttgtgggctcaagctcttcggtgttcaacttgacctatcttcttcttctcctccttcatcatcagcatctagtggttctgctcatccttattcacttgtcataaagaagagcctcagcatggatcgtctgtcttcttcctcggcctcctcctcgtctccatcttcatccctctcctcgccaagagttcttgctgatgaacactgcaataagacctccctcggatatctctctgatggcctcgccgctagatcccaggagaaaaggaaaggagttccgtggacggaagaagagcatcggacattcttaatggggctagagaagatggggaaaggcgattggagaggcatctccaggaactatgtgaccacgagaaccccaacccaagttgcgagtcatgcgcaaaaattctttctccggcaggccagtcttaataagaagaagcggcggtccagcctcttcgacatgatgggaagatgttctacttttcgcgagcaaagcgaaccaccacgcttgatcagaacagagagctctcttcgatatgaagtggtgcctcttcttgcaatgagcaccttcaagcctggtgatgaagagagtgatcgtgagccacatgattcaatttcaagacctccttcgctctgtgatttggccaatcccttggagctgaaaccatcaccagtaaaccccataaagaatccatcactgtctcatgcagcacctgacctagagctcacactggctgctccaatgccattggaccaaaatgaaacctcaccttcctctcttttcgttggatccattagtgtgacctaacctaacaaacaacatgcataaattattcctggaaatatgcatgtgctgtctctgatctctcatctctctcgagtctcattggatcaagaatatcagatgtgcaaatgtttctcatgctacgaatacttcgtttttgctcttttcttgatgatagaggatgttattagtggagaagcagagatctagagggtgatcagcactgtctttgaacgtttgattggatcttgcgtccatgactttccaagacatgagttttgtagtccaaaaaaaaaa

SEQ ID NO: 2372 - protein, 296 aa, Eucalyptus grandis
MGRKCSRCGNIGHNSRTCTTFMGAASACGLKLFGVQLDLSSSSPPSSSASSGSAHPYSLVIKKSLSMDRLSSSSASSSSPSSSLSSPRVLADEHCNKTSLGYLSDGLAARSQEKRKGVPWTEEEHRTFLMGLEKMGKGDWRGISRNYVTTRTPTQVASHAQKFFLRQASLNKKKRRSSLFDMMGRCSTFREQSEPPRLIRTESSLRYEVVPLLAMSTFKPGDEESDREPHDSISRPPSLCDLANPLELKPSPVNPIKNPSLSHAAPDLELTLAAPMPLDQNETSPSSLFVGSISVT

SEQ ID NO: 2373 - DNA, 10567 bp, Artificial Sequence
  Plasmid pWVK249
cgccggcgttgtggatacctcgcggaaaacttggccctcactgacagatgaggggcggacgttgacacttgaggggccgactcacccggcgcggcgttgacagatgaggggcaggctcgatttcggccggcgacgtggagctggccagcctcgcaaatcggcgaaaacgcctgattttacgcgagtttcccacagatgatgtggacaagcctggggataagtgccctgcggtattgacacttgaggggcgcgactactgacagatgaggggcgcgatccttgacacttgaggggcagagtgctgacagatgaggggcgcacctattgacatttgaggggctgtccacaggcagaaaatccagcatttgcaagggtttccgcccgtttttcggccaccgctaacctgtcttttaacctgcttttaaaccaatatttataaaccttgtttttaaccagggctgcgccctgtgcgcgtgaccgcgcacgccgaaggggggtgcccccccttctcgaaccctcccggcccgctaacgcgggcctcccatccccccaggggctgcgcccctcggccgcgaacggcctcaccccaaaaatggcagcgctggcagtccataattgtggtttcaaaatcggctccgtcgatactatgttatacgccaactttgaaaacaactttgaaaaagctgttttctggtatttaaggttttagaatgcaaggaacagtgaattggagttcgtcttgttataattagcttcttggggtatctttaaatactgtagaaaagaggaaggaaataataaatggctaaaatgagaatatcaccggaattgaaaaaactgatcgaaaaataccgctgcgtaaaagatacggaaggaatgtctcctgctaaggtatataagctggtgggagaaaatgaaaacctatatttaaaaatgacggacagccggtataaagggaccacctatgatgtggaacgggaaaaggacatgatgctatggctggaaggaaagctgcctgttccaaaggtcctgcactttgaacggcatgatggctggagcaatctgctcatgagtgaggccgatggcgtcctttgctcggaagagtatgaagatgaacaaagccctgaaaagattatcgagctgtatgcggagtgcatcaggctctttcactccatcgacatatcggattgtccctatacgaatagcttagacagccgcttagccgaattggattacttactgaataacgatctggccgatgtggattgcgaaaactgggaagaagacactccatttaaagatccgcgcgagctgtatgattttttaaagacggaaaagcccgaagaggaacttgtcttttcccacggcgacctgggagacagcaacatctttgtgaaagatggcaaagtaagtggctttattgatcttgggagaagcggcagggcggacaagtggtatgacattgccttctgcgtccggtcgatcagggaggatatcggggaagaacagtatgtcgagctattttttgacttactggggatcaagcctgattgggagaaaataaaatattatattttactggatgaattgttttagtacctagatgtggcgcaacgatgccggcgacaagcaggagcgcaccgacttcttccgcatcaagtgttttggctctcaggccgaggcccacggcaagtatttgggcaaggggtcgctggtattcgtgcagggcaagattcggaataccaagtacgagaaggacggccagacggtctacgggaccgacttcattgccgataaggtggattatctggacaccaaggcaccaggcgggtcaaatcaggaataagggcacattgccccggcgtgagtcggggcaatcccgcaaggagggtgaatgaatcggacgtttgaccggaaggcatacaggcaagaactgatcgacgcggggttttccgccgaggatgccgaaaccatcgcaagccgcaccgtcatgcgtgcgccccgcgaaaccttccagtccgtcggctcgatggtccagcaagctacggccaagatcgagcgcgacagcgtgcaactggctccccctgccctgcccgcgccatcggccgccgtggagcgttcgcgtcgtctcgaacaggaggcggcaggtttggcgaagtcgatgaccatcgacacgcgaggaactatgacgaccaagaagcgaaaaaccgccggcgaggacctggcaaaacaggtcagcgaggccaagcaggccgcgttgctgaaacacacgaagcagcagatcaaggaaatgcagctttccttgttcgatattgcgccgtggccggacacgatgcgagcgatgccaaacgacacggcccgctctgccctgttcaccacgcgcaacaagaaaatcccgcgcgaggcgctgcaaaacaaggtcattttccacgtcaacaaggacgtgaagatcacctacaccggcgtcgagctgcgggccgacgatgacgaactggtgtggcagcaggtgttggagtacgcgaagcgcacccctatcggcgagccgatcaccttcacgttctacgagctttgccaggacctgggctggtcgatcaatggccggtattacacgaaggccgaggaatgcctgtcgcgcctacaggcgacggcgatgggcttcacgtccgaccgcgttgggcacctggaatcggtgtcgctgctgcaccgcttccgcgtcctggaccgtggcaagaaaacgtcccgttgccaggtcctgatcgacgaggaaatcgtcgtgctgtttgctggcgaccactacacgaaattcatatgggagaagtaccgcaagctgtcgccgacggcccgacggatgttcgactatttcagctcgcaccgggagccgtacccgctcaagctggaaaccttccgcctcatgtgcggatcggattccacccgcgtgaagaagtggcgcgagcaggtcggcgaagcctgcgaagagttgcgaggcagcggcctggtggaacacgcctgggtcaatgatgacctggtgcattgcaaacgctagggccttgtggggtcagttccggctgggggttcagcagccagcgctttactggcatttcaggaacaagcgggcactgctcgacgcacttgcttcgctcagtatcgctcgggacgcacggcgcgctctacgaactgccgatagacaactgtcacggttaagcgagaaatgaataagaaggctgataattcggatctctgcgagggagatgatatttgatcacaggcagcaacgctctgtcatcgttacaatcaacatgctaccctccgcgagatcatccgtgtttcaaacccggcagcttagttgccgttcttccgaatagcatcggtaacatgagcaaagtctgccgccttacaacggctctcccgctgacgccgtcccggactgatgggctgcctgtatcgagtggtgattttgtgccgagctgccggtcggggagctgttggctggctggtggcaggatatattgtggtgtaaacaaattgacgcttagacaacttaataacacattgcggacgtttttaatgtactggggtggtttttcttttcaccagtgagacgggcaacagctgattgcccttcaccgcctggccctgagagagttgcagcaagcggtccacgctggtttgccccagcaggcgaaaatcctgtttgatggtggttccgaaatcggcaaaatcccttataaatcaaaagaatagcccgagatagggttgagtgttgttccagtttggaacaagagtccactattaaagaacgtggactccaacgtcaaagggcgaaaaaccgtctatcagggcgatggcccacggccgctctagaactagtggatcccccctacgtgcgatctagtaacatagatgacaccgcgcgcgataatttatcctagtttgcgcgctatattttgttttctatcgcgtattaaatgtataattgcgggactctaatcataaaaacccatctcataaataacgtcatgcattacatgttaattattacatgcttaacgtaattcaacagaaattatatgataatcatcgcaagaccggcaacaggattcaatcttaagaaactttattgccaaatgtttgaacgatccctcagaagaactcgtcaagaaggcgatagaaggcgatgcgctgcgaatcgggagcggcgataccgtaaagcacgaggaagcggtcagcccattcgccgccaagctcttcagcaatatcacgggtagccaacgctatgtcctgatagcggtccgccacacccagccggccacagtcgatgaatccagaaaagcggccattttccaccatgatattcggcaagcaggcatcgccatgggtcacgacgagatcctcgccgtcgggcatgcgcgccttgagcctggcgaacagttcggctggcgcgagcccctgatgctcttcgtccagatcatcctgatcgacaagaccggcttccatccgagtacgtgctcgctcgatgcgatgtttcgcttggtggtcgaatgggcaggtagccggatcaagcgtatgcagccgccgcattgcatcagccatgatggatactttctcggcaggagcaaggtgagatgacaggagatcctgccccggcacttcgcccaatagcagccagtcccttcccgcttcagtgacaacgtcgagcacagctgcgcaaggaacgcccgtcgtggccagccacgatagccgcgctgcctcgtcctggagttcattcagggcaccggacaggtcggtcttgacaaaaagaaccgggcgcccctgcgctgacagccggaacacggcggcatcagagcagccgattgtctgttgtgcccagtcatagccgaatagcctctccacccaagcggccggagaacctgcgtgcaatccatcttgttcaatcatctgttaatcagaaaaactcagattaatcgacaaattcgatcgcacaaactagaaactaacaccagatctagatagaaatcacaaatcgaagagtaattattcgacaaaactcaaattatttgaacaaatcggatgatatttatgaaaccctaatcgagaattaagatgatatctaacgatcaaacccagaaaatcgtcttcgatctaagattaacagaatctaaaccaaagaacatatacgaaattgggatcgaacgaaaacaaaatcgaagattttgagagaataaggaacacagaaatttaccttgatcacggtagagagaattgagagaaagtttttaagattttgagaaattgaaatctgaattgtgaagaagaagagctctttgggtattgttttatagaagaagaagaagaaaagacgaggacgactaggtcacgagaaagctaaggcggtgaagcaatagctaataataaaatgacacgtgtattgagcgttgtttacacgcaaagttgtttttggctaattgccttatttttaggttgaggaaaagtatttgtgctttgagttgataaacacgactcgtgtgtgccggctgcaaccactttgacgccgtttattactgactcgtcgacaaccacaatttctaacggtcgtcataagatccagccgttgagatttaacgatcgttacgatttatatttttttagcattatcgttttattttttaaatatacggtggagctgaaaattggcaataattgaaccgtgggtcccactgcattgaagcgtatttcgtattttctagaattcttcgtgctttatttcttttcctttttgtttttttttgccatttatctaatgcaagtgggcttataaaatcagtgaatttcttggaaaagtaacttctttatcgtataacatattgtgaaattatccatttcttttaattttttagtgttattggatatttttgtatgattattgatttgcataggataatgacttttgtatcaagttggtgaacaagtctcgttaaaaaaggcaagtggtttggtgactcgatttattcttgttatttaattcatatatcaatggatcttatttggggcctggtccatatttaacactcgtgttcagtccaatgaccaataatattttttcattaataacaatgtaacaagaatgatacacaaaacattctttgaataagttcgctatgaagaagggaacttatccggtcctagatcatcagttcatacaaacctccatagagttcaacatcttaaacaaggatatcctgatccgttgacggcgcgccaagcggccgcggccgggtggtgacatttattcataaattcatctcaaaacaagaaggatttacaaaaataaaagaaaacaaaattttcatctttaacataattataattgtgttcacaaaattcaaacttaaacccttaatataaagaatttctttcaacaatacactttaatcacaacttcttcaatcacaacctcctccaacaaaattaaaatagattaataaataaataaacttaactatttaaaaaaaaatattatacaaaatttattaaaacttcaaaataaacaaactttttatacaaaattcatcaaaactttaaaataaagctaaacactgaaaatgtgagtacatttaaaaggacgctgatcacaaaaattttgaaaacataaacaaacttgaaactctaccttttaagaatgagtttgtcgtctcattaactcattagttttatagttcgaatccaattaacgtatcttttattttatggaataagggtgttttaataagtgattttgggatttttttagtaatttatttgtgatatgttatggagtttttaaaaatatatatatatatatatatttttgggttgagtttacttaaaatttggaaaaggttggtaagaactataaattgagttgtgaatgagtgttttatggattttttaagatgttaaatttatatatgtaattaaaattttattttgaataacaaaaattataattggataaaaaattgttttgttaaatttagagtaaaaatttcaaaatctaaaataattaaacactattatttttaaaaaatttgttggtaaattttatcttatatttaagttaaaatttagaaaaaattaattttaaattaataaacttttgaagtcaaatattccaaatattttccaaaatattaaatctattttgcattcaaaatacaatttaaataataaaacttcatggaatagattaaccaatttgtataaaaaccaaaaatctcaaataaaatttaaattacaaaacattatcaacattatgatttcaagaaagacaataaccagtttccaataaaataaaaaacctcatggcccgtaattaagatctcattaattaattcttattttttaatttttttacatagaaaatatctttatattgtatccaagaaatatagaatgttctcgtccagggactattaatctccaaacaagtttcaaaatcattacattaaagctcatcatgtcatttgtggattggaaattatattgtataagagaaatatagaatgttctcgtctagggactattaatttccaaacaaatttcaaaatcattacattaaagctcatcatgtcatttgtggattggaaattagacaaaaaaaatcccaaatatttctctcaatctcccaaaatatagttcgaactccatatttttggaaattgagaatttttttacccaataatatatttttttatacattttagagattttccagacatatttgctctgggatttattggaatgaaggttgagttataaactttcagtaatccaagtatcttcggtttttgaagatactaaatccattatataataaaaacacattttaaacaccaatttaatgggatttcagatttgtatcccatgctattggctaaggcatttttcttattgtaatctaaccaattctaatttccacctggtgtgaactgactgacaaatgcggtccgaaaacagcgaatgaaatgtctgggtgatcggtcaaacaagcggtgggcgagagagcgcgggtgttggcctagccgggatgggggtaggtagacggcgtattaccggcgagttgtccgaatggagttttcggggtaggtagtaacgtagacgtcaatggaaaaagtcataatctccgtcaaaaatccaaccgctccttcacatcgcagagttggtggccacgggaccctccacccactcactcgatcgcctgccgtggttgcccattattcaaccatacgccacttgactcttcaccaacaattccaggccggctttctatacaatgtactgcacaggaaaatccaatataaaaagccggcctctgcttccttctcagtagcccccagctcattcaattcttcccactgcaggctacatttgtcagacacgttttccgccatttttcgcctgtttctgcggagaatttgatcaggttcggattgggattgaatcaattgaaaggtttttattttcagtatttcgatcgccggatcccccaattcggcacgagatcgcccccgttctctccctctctctccctctcccccctaacgtttctggccctcttctttgtctggacaaaaagatgggaagaaagtgctctcgctgtgggaacataggccataactcaaggacttgcacaactttcatgggggcagcaagtgcttgtgggctcaagctcttcggtgttcaacttgacctatcttcttcttctcctccttcatcatcagcatctagtggttctgctcatccttattcacttgtcataaagaagagcctcagcatggatcgtctgtcttcttcctcggcctcctcctcgtctccatcttcatccctctcctcgccaagagttcttgctgatgaacactgcaataagacctccctcggatatctctctgatggcctcgccgctagatcccaggagaaaaggaaaggagttccgtggacggaagaagagcatcggacattcttaatggggctagagaagatggggaaaggcgattggagaggcatctccaggaactatgtgaccacgagaaccccaacccaagttgcgagtcatgcgcaaaaattctttctccggcaggccagtcttaataagaagaagcggcggtccagcctcttcgacatgatgggaagatgttctacttttcgcgagcaaagcgaaccaccacgcttgatcagaacagagagctctcttcgatatgaagtggtgcctcttcttgcaatgagcaccttcaagcctggtgatgaagagagtgatcgtgagccacatgattcaatttcaagacctccttcgctctgtgatttggccaatcccttggagctgaaaccatcaccagtaaaccccataaagaatccatcactgtctcatgcagcacctgacctagagctcacactggctgctccaatgccattggaccaaaatgaaacctcaccttcctctcttttcgttggatccattagtgtgacctaacctaacaaacaacatgcataaattattcctggaaatatgcatgtgctgtctctgatctctcatctctctcgagtctcattggatcaagaatatcagatgtgcaaatgtttctcatgctacgaatacttcgtttttgctcttttcttgatgatagaggatgttattagtggagaagcagagatctagagggtgatcagcactgtctttgaacgtttgattggatcttgcgtccatgactttccaagacatgagttttgtagtccaaaaaaaaaaaaaaaaaactcgagagtgggctgcaggaattcgtccagcagttgtctggagctccaccagaaatctggaagctctacaattggctagcaaagtacttaaagcttccatcgatgggtgttatttgtggataataaattcgggtgatgttcagtgtttgtcgtatttctcacgaataaattgtgtttatgtatgtgttagtgttgtttgtctgtttcagaccctcttatgttatatttttcttttcgtcggtcagttgaagccaatactggtgtcctggccggcactgcaataccatttcgtttaatataaagactctgttatccgtgagctcgaatttccccgatcgttcaaacatttggcaataaagtttcttaagattgaatcctgttgccggtcttgcgatgattatcatataatttctgttgaattacgttaagcatgtaataattaacatgtaatgcatgacgttatttatgagatgggtttttatgattagagtcccgcaattatacatttaatacgcgatagaaaacaaaatatagcgcgcaaactaggataaattatcgcgcgcggtgtcatctatgttactagatcgcggccgcatttaaatgggccctgttaactggtaccttaattaaaagtttaaactatcagtgtttgacaggatatattggcgggtaaacctaagagaaaagagcgtttattagaataatcggatatttaaaagggcgtgaaaaggtttatccgttcgtccatttgtatgtgcatgccaaccacagggttccccagatc

SEQ ID NO: 2374 - DNA, 1765 bp, Pinus radiata
ctcgctctcgcgctctcgtcagtcgagcgtgttcgtctcagcctcagagataaaaagaggagagcagccgaagaccaggagggtagagaggcttatcagactcacatcaaacgaaactggagccgtgaagggttagttgcggtgttaaattctaggacagctttccgtattagaaagaggcgccctttacgggagtcggcaccaaaccagagtggagagaaataatgggtagggctccctgctgcgaaaaggttgggctcaagaagggcccctggacgccggaggaagatcaaaagctcctcgcttacatacaggagcacggccatggcagctggagggctctgcctcagaaagctgggttgctaagatgcgggaaaagctgcagattgcgttggactaactatctaagaccagatatcaagcggggaaagttcaacccacaggaagaacagacaattattcaacttcatgcccttctgggaaataggtggtccaccatcgccactcaccttcctaagcgaactgacaacgagatcaagaactactggaatacccatctgaaaaagcgcttggtgcagatgggaatcgaccccatgacgcacaagccgaagtccgaatcgactattgcagttggccgtcagtcgtgtaatgggtcgtcgaatctgagccatatggcgcagtgggagagcgcgcgcctggaagccgaatcgaggttggcgcgcgagtcgaagttcagggcccagggcctatggcctccgtccatgagaaaccctaatgtgaactcagatatacttactagattgcggttagccggtcaaggattcgattccgataaggaagggtcaaacattttggggttgaaccctactggcggctttgaacgtatgaaaatagcaggcaaatgggacaagttccaagatttgagtttggggattaagtcagaccaaagcaattcttctgcgctgggaagttccttgagaggttataatccagtggagaatgatcagagcgcggaccgagccagtaacacgagctatctcagccttctgcaacaagccatgtgtccttctgctcaaggcagcaaaattctgtacaatgaggccaagaagctgatggagaaccagaagaaccggcaggctaatgtaacggccaccctttataatgtccaccaacctcatggaaattgcagtgaaagcaagcatctatgagaaagcccagaccgatgtccagagctccagcgactgagagaacgtggagccatcaagagattctgtacttgtactttgcccacaggaattatttggtacgaggtcagatgtgtcagagctcttcaaatctgagcaaggagttgaccccacttcatgttttctctgcatgctgagttacaaatcgacctctgcttaattgaattgggcgtcctctcctgctaaagctgctccattttgctgattaaagctgctcttacacgctggcataagtcgcacttcatggtcaatacaattgacgatgacagaacgaaaggaaatgatgaaagaaagatgaggaaatagtgaaaacaaataaatgggatatagcgaaaatcaaagatgataagactcttagtttccttttctctcgaatccagtttcttcgttctctcctttcacctccctgtatgtatttatttttgtattcaattactctaacgtgattagtgtatttacatttgtattagatgtgacttttacattttaatgtataatagattaatgttttaaaaaaaaaa

SEQ ID NO: 2375 - protein, 327 aa, Pinus radiata
MGRAPCCEKVGLKKGPWTPEEDQKLLAYIQEHGHGSWRALPQKAGLLRCGKSCRLRWTNYLRPDIKRGKFNPQEEQTIIQLHALLGNRWSTIATHLPKRTDNEIKNYWNTHLKKRLVQMGIDPMTHKPKSESTIAVGRQSCNGSSNLSHMAQWESARLEAESRLARESKFRAQGLWPPSMRNPNVNSDILTRLRLAGQGFDSDKEGSNILGLNPTGGFERMKIAGKWDKFQDLSLGIKSDQSNSSALGSSLRGYNPVENDQSADRASNTSYLSLLQQAMCPSAQGSKILYNEAKKLMENQKNRQANVTATLYNVHQPHGNCSESKHL

SEQ ID NO: 2376 - DNA, 11230 bp, Artificial Sequence
  Plasmid pKNC153
cgccggcgttgtggatacctcgcggaaaacttggccctcactgacagatgaggggcggacgttgacacttgaggggccgactcacccggcgcggcgttgacagatgaggggcaggctcgatttcggccggcgacgtggagctggccagcctcgcaaatcggcgaaaacgcctgattttacgcgagtttcccacagatgatgtggacaagcctggggataagtgccctgcggtattgacacttgaggggcgcgactactgacagatgaggggcgcgatccttgacacttgaggggcagagtgctgacagatgaggggcgcacctattgacatttgaggggctgtccacaggcagaaaatccagcatttgcaagggtttccgcccgtttttcggccaccgctaacctgtcttttaacctgcttttaaaccaatatttataaaccttgtttttaaccagggctgcgccctgtgcgcgtgaccgcgcacgccgaaggggggtgcccccccttctcgaaccctcccggcccgctaacgcgggcctcccatccccccaggggctgcgcccctcggccgcgaacggcctcaccccaaaaatggcagcgctggcagtccataattgtggtccaatttgcagccgtccgagacaggaggacatcgtccagctgaaaccggggcagaatccggccatttctgaagagaaaaatggtaaactgatagaataaaatcataagaaaggagccgcacatgaaaaaagcagtcattaacggggaacaaatcagaagtatcagcgacctccaccagacattgaaaaaggagcttgcccttccggaatactacggtgaaaacctggacgctttatgggattgtctgaccggatgggtggagtacccgctcgttttggaatggaggcagtttgaacaaagcaagcagctgactgaaaatggcgccgagagtgtgcttcaggttttccgtgaagcgaaagcggaaggctgcgacatcaccatcatactttcttaatacgatcaatgggagaggaacaatatggaaacacaaaccacaattgtggtttcaaaatcggctccgtcgatactatgttatacgccaactttgaaaacaactttgaaaaagctgttttctggtatttaaggttttagaatgcaaggaacagtgaattggagttcgtcttgttataattagcttcttggggtatctttaaatactgtagaaaagaggaaggaaataataaatggctaaaatgagaatatcaccggaattgaaaaaactgatcgaaaaataccgctgcgtaaaagatacggaaggaatgtctcctgctaaggtatataagctggtgggagaaaatgaaaacctatatttaaaaatgacggacagccggtataaagggaccacctatgatgtggaacgggaaaaggacatgatgctatggctggaaggaaagctgcctgttccaaaggtcctgcactttgaacggcatgatggctggagcaatctgctcatgagtgaggccgatggcgtcctttgctcggaagagtatgaagatgaacaaagccctgaaaagattatcgagctgtatgcggagtgcatcaggctctttcactccatcgacatatcggattgtccctatacgaatagcttagacagccgcttagccgaattggattacttactgaataacgatctggccgatgtggattgcgaaaactgggaagaagacactccatttaaagatccgcgcgagctgtatgattttttaaagacggaaaagcccgaagaggaacttgtcttttcccacggcgacctgggagacagcaacatctttgtgaaagatggcaaagtaagtggctttattgatcttgggagaagcggcagggcggacaagtggtatgacattgccttctgcgtccggtcgatcagggaggatatcggggaagaacagtatgtcgagctattttttgacttactggggatcaagcctgattgggagaaaataaaatattatattttactggatgaattgttttagtacctagatgtggcgcaacgatgccggcgacaagcaggagcgcaccgacttcttccgcatcaagtgttttggctctcaggccgaggcccacggcaagtatttgggcaaggggtcgctggtattcgtgcagggcaagattcggaataccaagtacgagaaggacggccagacggtctacgggaccgacttcattgccgataaggtggattatctggacaccaaggcaccaggcgggtcaaatcaggaataagggcacattgccccggcgtgagtcggggcaatcccgcaaggagggtgaatgaatcggacgtttgaccggaaggcatacaggcaagaactgatcgacgcggggttttccgccgaggatgccgaaaccatcgcaagccgcaccgtcatgcgtgcgccccgcgaaaccttccagtccgtcggctcgatggtccagcaagctacggccaagatcgagcgcgacagcgtgcaactggctccccctgccctgcccgcgccatcggccgccgtggagcgttcgcgtcgtctcgaacaggaggcggcaggtttggcgaagtcgatgaccatcgacacgcgaggaactatgacgaccaagaagcgaaaaaccgccggcgaggacctggcaaaacaggtcagcgaggccaagcaggccgcgttgctgaaacacacgaagcagcagatcaaggaaatgcagctttccttgttcgatattgcgccgtggccggacacgatgcgagcgatgccaaacgacacggcccgctctgccctgttcaccacgcgcaacaagaaaatcccgcgcgaggcgctgcaaaacaaggtcattttccacgtcaacaaggacgtgaagatcacctacaccggcgtcgagctgcgggccgacgatgacgaactggtgtggcagcaggtgttggagtacgcgaagcgcacccctatcggcgagccgatcaccttcacgttctacgagctttgccaggacctgggctggtcgatcaatggccggtattacacgaaggccgaggaatgcctgtcgcgcctacaggcgacggcgatgggcttcacgtccgaccgcgttgggcacctggaatcggtgtcgctgctgcaccgcttccgcgtcctggaccgtggcaagaaaacgtcccgttgccaggtcctgatcgacgaggaaatcgtcgtgctgtttgctggcgaccactacacgaaattcatatgggagaagtaccgcaagctgtcgccgacggcccgacggatgttcgactatttcagctcgcaccgggagccgtacccgctcaagctggaaaccttccgcctcatgtgcggatcggattccacccgcgtgaagaagtggcgcgagcaggtcggcgaagcctgcgaagagttgcgaggcagcggcctggtggaacacgcctgggtcaatgatgacctggtgcattgcaaacgctagggccttgtggggtcagttccggctgggggttcagcagccagcgctttactggcatttcaggaacaagcgggcactgctcgacgcacttgcttcgctcagtatcgctcgggacgcacggcgcgctctacgaactgccgatagacaactgtcacggttaagcgagaaatgaataagaaggctgataattcggatctctgcgagggagatgatatttgatcacaggcagcaacgctctgtcatcgttacaatcaacatgctaccctccgcgagatcatccgtgtttcaaacccggcagcttagttgccgttcttccgaatagcatcggtaacatgagcaaagtctgccgccttacaacggctctcccgctgacgccgtcccggactgatgggctgcctgtatcgagtggtgattttgtgccgagctgccggtcggggagctgttggctggctggtggcaggatatattgtggtgtaaacaaattgacgcttagacaacttaataacacattgcggacgtttttaatgtactggggtggtttttcttttcaccagtgagacgggcaacagctgattgcccttcaccgcctggccctgagagagttgcagcaagcggtccacgctggtttgccccagcaggcgaaaatcctgtttgatggtggttccgaaatcggcaaaatcccttataaatcaaaagaatagcccgagatagggttgagtgttgttccagtttggaacaagagtccactattaaagaacgtggactccaacgtcaaagggcgaaaaaccgtctatcagggcgatggcccacggccgctctagaactagtggatcccccctacgtgcgatctagtaacatagatgacaccgcgcgcgataatttatcctagtttgcgcgctatattttgttttctatcgcgtattaaatgtataattgcgggactctaatcataaaaacccatctcataaataacgtcatgcattacatgttaattattacatgcttaacgtaattcaacagaaattatatgataatcatcgcaagaccggcaacaggattcaatcttaagaaactttattgccaaatgtttgaacgatccctcagaagaactcgtcaagaaggcgatagaaggcgatgcgctgcgaatcgggagcggcgataccgtaaagcacgaggaagcggtcagcccattcgccgccaagctcttcagcaatatcacgggtagccaacgctatgtcctgatagcggtccgccacacccagccggccacagtcgatgaatccagaaaagcggccattttccaccatgatattcggcaagcaggcatcgccatgggtcacgacgagatcctcgccgtcgggcatgcgcgccttgagcctggcgaacagttcggctggcgcgagcccctgatgctcttcgtccagatcatcctgatcgacaagaccggcttccatccgagtacgtgctcgctcgatgcgatgtttcgcttggtggtcgaatgggcaggtagccggatcaagcgtatgcagccgccgcattgcatcagccatgatggatactttctcggcaggagcaaggtgagatgacaggagatcctgccccggcacttcgcccaatagcagccagtcccttcccgcttcagtgacaacgtcgagcacagctgcgcaaggaacgcccgtcgtggccagccacgatagccgcgctgcctcgtcctggagttcattcagggcaccggacaggtcggtcttgacaaaaagaaccgggcgcccctgcgctgacagccggaacacggcggcatcagagcagccgattgtctgttgtgcccagtcatagccgaatagcctctccacccaagcggccggagaacctgcgtgcaatccatcttgttcaatcatctgttaatcagaaaaactcagattaatcgacaaattcgatcgcacaaactagaaactaacaccagatctagatagaaatcacaaatcgaagagtaattattcgacaaaactcaaattatttgaacaaatcggatgatatttatgaaaccctaatcgagaattaagatgatatctaacgatcaaacccagaaaatcgtcttcgatctaagattaacagaatctaaaccaaagaacatatacgaaattgggatcgaacgaaaacaaaatcgaagattttgagagaataaggaacacagaaatttaccttgatcacggtagagagaattgagagaaagtttttaagattttgagaaattgaaatctgaattgtgaagaagaagagctctttgggtattgttttatagaagaagaagaagaaaagacgaggacgactaggtcacgagaaagctaaggcggtgaagcaatagctaataataaaatgacacgtgtattgagcgttgtttacacgcaaagttgtttttggctaattgccttatttttaggttgaggaaaagtatttgtgctttgagttgataaacacgactcgtgtgtgccggctgcaaccactttgacgccgtttattactgactcgtcgacaaccacaatttctaacggtcgtcataagatccagccgttgagatttaacgatcgttacgatttatatttttttagcattatcgttttattttttaaatatacggtggagctgaaaattggcaataattgaaccgtgggtcccactgcattgaagcgtatttcgtattttctagaattcttcgtgctttatttcttttcctttttgtttttttttgccatttatctaatgcaagtgggcttataaaatcagtgaatttcttggaaaagtaacttctttatcgtataacatattgtgaaattatccatttcttttaattttttagtgttattggatatttttgtatgattattgatttgcataggataatgacttttgtatcaagttggtgaacaagtctcgttaaaaaaggcaagtggtttggtgactcgatttattcttgttatttaattcatatatcaatggatcttatttggggcctggtccatatttaacactcgtgttcagtccaatgaccaataatattttttcattaataacaatgtaacaagaatgatacacaaaacattctttgaataagttcgctatgaagaagggaacttatccggtcctagatcatcagttcatacaaacctccatagagttcaacatcttaaacaaggatatcctgatccgttgacggcgcgccaagcggccgcatttaaatgggccctatctaatcgaattttgtaaactggtttgataagccatcaatgcatcagtcaagaatgaatcattgcaactaagttgatataattcaatttaccatagaactcaaatgttgatatcttcttatggattttctgatcttctacattattagaaagaaacttgatttaccagtaatgatgatacatatccaatagaacgaaataagccaatctttataggttttggtagtaaagttacaacatcagagacatgtatgtattgtctctcagaagagctcttgaccgatcagagtttgaagaaaaatttattacacactttatgtaaagctgaaaaaaacggcctcccgcagggaagccgtttttttcgttatctgatttttgtaaaggtctgatactcgtccgttgttttgtaaatcagccagtcgcttgagtaaagaatccggtctgaatttctgaagcctgatgtatagttaatatccgcttcacgccatgttcgtccgcttttgcccgggagtttgccttccctgtttgagaagatgtctccgccgatgcttttccccggagcgacgtctgcaaggttcccttttgatgccacccagccgagggcttgtgcttctgattttgtaatgtaattatcaggtagcttatgatatgtctgaagataatccgcaaccccgtcaaacgtgttgataacctgtgccataaatcttctaaaaacagcagaactgactattcaaagaaagtagaacccacagaaagtaatcaaagtagtttgattaaatgcgttgtgtatcatcgcagcccctgctacggatatttataggaaaggtttgagagcaatgtgtgcagcaagttgtgtgtgaatcacctgcttccatggcggaggataaataatttagtcacgcatttagttgaacgtaactactaactcctctaccgctaatcattcttcttttgcccgggcaagttcaacaacaaccccacaatcacgcttcctgtattttgttttgttttcaaaacaatagaattcactttttactgccaaaattatgttttactcgagagcccgggctcctgcaattgaagcttctgttatcctgatccgttgacggcgcgccaagcggccgcaaaacccctcacaaatacataaaaaaaattctttatttaattatcaaactctccactacctttcccaccaaccgttacaatcctgaatgttggaaaaaactaactacattgatataaaaaaactacattacttcctaaatcatatcaaaattgtataaatatatccactcaaaggagtctagaagatccacttggacaaattgcccatagttggaaagatgttcaccaagtcaacaagatttatcaatggaaaaatccatctaccaaacttactttcaagaaaatccaaggattatagagtaaaaaatctatgtattattaagtcaaaaagaaaaccaaagtgaacaaatattgatgtacaagtttgagaggataagacattggaatcgtctaaccaggaggcggaggaattccctagacagttaaaagtggccggaatcccggtaaaaaagattaaaatttttttgtagagggagtgcttgaatcatgttttttatgatggaaatagattcagcaccatcaaaaacattcaggacacctaaaattttgaagtttaacaaaaataacttggatctacaaaaatccgtatcggattttctctaaatataactagaattttcataactttcaaagcaactcctcccctaaccgtaaaacttttcctacttcaccgttaattacattccttaagagtagataaagaaataaagtaaataaaagtattcacaaaccaacaatttatttcttttatttacttaaaaaaacaaaaagtttatttattttacttaaatggcataatgacatatcggagatccctcgaacgagaatcttttatctccctggttttgtattaaaaagtaatttattgtggggtccacgcggagttggaatcctacagacgcgctttacatacgtctcgagaagcgtgacggatgtgcgaccggatgaccctgtataacccaccgacacagccagcgcacagtatacacgtgtcatttctctattggaaaatgtcgttgttatccccgctggtacgcaaccaccgatggtgacaggtcgtctgttgtcgtgtcgcgtagcgggagaagggtctcatccaacgctattaaatactcgccttcaccgcgttacttctcatcttttctcttgcgttgtataatcagtgcgatattctcagagagcttttcattcaacccgggctgcagaacaattggctagtggatccaaagaattcggcacgaggccctcgctctcgcgctctcgtcagtcgagcgtgttcgtctcagcctcagagataaaaagaggagagcagccgaagaccaggagggtagagaggcttatcagactcacatcaaacgaaactggagccgtgaagggttagttgcggtgttaaattctaggacagctttccgtattagaaagaggcgccctttacgggagtcggcaccaaaccagagtggagagaaataatgggtagggctccctgctgcgaaaaggttgggctcaagaagggcccctggacgccggaggaagatcaaaagctcctcgcttacatacaggagcacggccatggcagctggagggctctgcctcagaaagctgggttgctaagatgcgggaaaagctgcagattgcgttggactaactatctaagaccagatatcaagcggggaaagttcaacccacaggaagaacagacaattattcaacttcatgcccttctgggaaataggtggtccaccatcgccactcaccttcctaagcgaactgacaacgagatcaagaactactggaatacccatctgaaaaagcgcttggtgcagatgggaatcgaccccatgacgcacaagccgaagtccgaatcgactattgcagttggccgtcagtcgtgtaatgggtcgtcgaatctgagccatatggcgcagtgggagagcgcgcgcctggaagccgaatcgaggttggcgcgcgagtcgaagttcagggcccagggcctatggcctccgtccatgagaaaccctaatgtgaactcagatatacttactagattgcggttagccggtcaaggattcgattccgataaggaagggtcaaacattttggggttgaaccctactggcggctttgaacgtatgaaaatagcaggcaaatgggacaagttccaagatttgagtttggggattaagtcagaccaaagcaattcttctgcgctgggaagttccttgagaggttataatccagtggagaatgatcagagcgcggaccgagccagtaacacgagctatctcagccttctgcaacaagccatgtgtccttctgctcaaggcagcaaaattctgtacaatgaggccaagaagctgatggagaaccagaagaaccggcaggctaatgtaacggccaccctttataatgtccaccaacctcatggaaattgcagtgaaagcaagcatctatgagaaagcccagaccgatgtccagagctccagcgactgagagaacgtggagccatcaagagattctgtacttgtactttgcccacaggaattatttggtacgaggtcagatgtgtcagagctcttcaaatctgagcaaggagttgaccccacttcatgttttctctgcatgctgagttacaaatcgacctctgcttaattgaattgggcgtcctctcctgctaaagctgctccattttgctgattaaagctgctcttacacgctggcataagtcgcacttcatggtcaatacaattgacgatgacagaacgaaaggaaatgatgaaagaaagatgaggaaatagtgaaaacaaataaatgggatatagcgaaaatcaaagatgataagactcttagtttccttttctctcgaatccagtttcttcgttctctcctttcacctccctgtatgtatttatttttgtattcaattactctaacgtgattagtgtatttacatttgtattagatgtgacttttacattttaatgtataatagattaatgttttaaaaaaaaaactcgagagtacttaaagcttgcactaccatgctataacagatactacttatgtatttcttatgctttgtgtgattttgtctctgtcttgtcctcgttaaatttgcttgcatgttgcctttaagcattgttagctaaattatgttgtttctgtgagttcaaatctttgaacaaaatttagggcttacaaaccatgcggccgcggtaccttaattaaaagtttaaactatcagtgtttgacaggatatattggcgggtaaacctaagagaaaagagcgtttattagaataatcggatatttaaaagggcgtgaaaaggtttatccgttcgtccatttgtatgtgcatgccaaccacagggttccccagatc

SEQ ID NO: 2377 - DNA, 1842 bp, Pinus radiata
gctggacaacacactatatagatttataaaattatatacagaggagatatccaattgcaggcagcttcccttctctttctcggcccttattttattctgtctctgccagaatcttctccagacaatggccaggccttgaggcttcagaaccatcctcgaatgtggaaaattcgacgattctgaagagcttatactctgtctcttctcagatcctgttggcaaaaaatggggaggcaaccttgctgtgacaaagtgggattgaagaagggtccatggactgcagaggaagacagaaaactggtgaattttatcaccctgcatggccatggatgctggcgcgaagtacccaaacttgctggtctgcttagatgtggcaagagttgtagattgcgttggacaaattacttgcgcccagatttgaagcgtggattattgtctgaatcagaggagaagctcatcattgatctacatgctgccatagggaataggtggtcacgaatcgctgcgcaattgccagggagaactgataacgagatcaagaattactggaacacgaggatcaagaagaaactgcgccagatgggaatcgatcctgtgactcacaagcctctcacccaaatgcaaatgcagagcacccctgcccagactctgctgctgcaagaaaatgatacagagcagcagcagcaggagcaacataatgagcctgatcctgatcagaatcagagcagcaatggcactgtggagacattggtctcgagggcgagagaaccccacgacgacatagagcctctgcagaatttcaacatggaggattcgaattttaacatggaggattcgatgcaattgttcaatgtctgctcgcccaccagcgggataagcctgtctgggagaaccgaggaggtcgattcagatgattctgatcaggtctccaagagcttcggcaatggcagcagtacccattctcagtacattgggcgagaaacctctggtgtcaaggccgaatgtggtttgtctggttgggatcagatggctggcgttttgggcgatcccctttctgagtggaatgtcgatttggaggcctgggctgctggattggatgcccctgcggcctctgcctctgcatggattcagcagctccctgactgccaatggaacgacttccaaggcgattttgagatctgcagcagcaagtcatgtccggagactctgcagagactggggccctttcttgatgacgatgaattgtgaaaaaggagatccaagaatctctttgtttctctcagaaagacactgtacattaaccaagtaaatatggaggaggaggatgagacctaatagttaaatatatatttatatatatagatatgagttaatgtgaatgaacttgtgtgtatctaattcattcattcattccatgtaaaagataccccatggtttaaactttgccatcttcataaattccaactctcagtcatcccatgtaacagataccacatggttttaaccttgccatcttcataaattccaattctcagtcattccatgtagcagataccacatggtttaaaccttgccatcttcataaattccaactctcagtttgtcacttctcagggtgaattgttaattatggtgttcagctttttattactgtttttaacctctcatactgtattgttagctatggggtgtctattaattatttatttatgacacttctcatggtcaattgttaacatagtattcagcttcttattattgtttttaactcctcatactgtattgttagctatggggtgtccatcaattatttatgactctcgtttgcatttaaaaaaaaaa

SEQ ID NO: 2378 - protein, 340 aa, Pinus radiata
MGRQPCCDKVGLKKGPWTAEEDRKLVNFITLHGHGCWREVPKLAGLLRCGKSCRLRWTNYLRPDLKRGLLSESEEKLIIDLHAAIGNRWSRIAAQLPGRTDNEIKNYWNTRIKKKLRQMGIDPVTHKPLTQMQMQSTPAQTLLLQENDTEQQQQEQHNEPDPDQNQSSNGTVETLVSRAREPHDDIEPLQNFNMEDSNFNMEDSMQLFNVCSPTSGISLSGRTEEVDSDDSDQVSKSFGNGSSTHSQYIGRETSGVKAECGLSGWDQMAGVLGDPLSEWNVDLEAWAAGLDAPAASASAWIQQLPDCQWNDFQGDFEICSSKSCPETLQRLGPFLDDDEL

SEQ ID NO: 2379 - DNA, 10924 bp, Artificial Sequence
  Plasimd pWVK230
cgccggcgttgtggatacctcgcggaaaacttggccctcactgacagatgaggggcggacgttgacacttgaggggccgactcacccggcgcggcgttgacagatgaggggcaggctcgatttcggccggcgacgtggagctggccagcctcgcaaatcggcgaaaacgcctgattttacgcgagtttcccacagatgatgtggacaagcctggggataagtgccctgcggtattgacacttgaggggcgcgactactgacagatgaggggcgcgatccttgacacttgaggggcagagtgctgacagatgaggggcgcacctattgacatttgaggggctgtccacaggcagaaaatccagcatttgcaagggtttccgcccgtttttcggccaccgctaacctgtcttttaacctgcttttaaaccaatatttataaaccttgtttttaaccagggctgcgccctgtgcgcgtgaccgcgcacgccgaaggggggtgcccccccttctcgaaccctcccggcccgctaacgcgggcctcccatccccccaggggctgcgcccctcggccgcgaacggcctcaccccaaaaatggcagcgctggcagtccataattgtggtttcaaaatcggctccgtcgatactatgttatacgccaactttgaaaacaactttgaaaaagctgttttctggtatttaaggttttagaatgcaaggaacagtgaattggagttcgtcttgttataattagcttcttggggtatctttaaatactgtagaaaagaggaaggaaataataaatggctaaaatgagaatatcaccggaattgaaaaaactgatcgaaaaataccgctgcgtaaaagatacggaaggaatgtctcctgctaaggtatataagctggtgggagaaaatgaaaacctatatttaaaaatgacggacagccggtataaagggaccacctatgatgtggaacgggaaaaggacatgatgctatggctggaaggaaagctgcctgttccaaaggtcctgcactttgaacggcatgatggctggagcaatctgctcatgagtgaggccgatggcgtcctttgctcggaagagtatgaagatgaacaaagccctgaaaagattatcgagctgtatgcggagtgcatcaggctctttcactccatcgacatatcggattgtccctatacgaatagcttagacagccgcttagccgaattggattacttactgaataacgatctggccgatgtggattgcgaaaactgggaagaagacactccatttaaagatccgcgcgagctgtatgattttttaaagacggaaaagcccgaagaggaacttgtcttttcccacggcgacctgggagacagcaacatctttgtgaaagatggcaaagtaagtggctttattgatcttgggagaagcggcagggcggacaagtggtatgacattgccttctgcgtccggtcgatcagggaggatatcggggaagaacagtatgtcgagctattttttgacttactggggatcaagcctgattgggagaaaataaaatattatattttactggatgaattgttttagtacctagatgtggcgcaacgatgccggcgacaagcaggagcgcaccgacttcttccgcatcaagtgttttggctctcaggccgaggcccacggcaagtatttgggcaaggggtcgctggtattcgtgcagggcaagattcggaataccaagtacgagaaggacggccagacggtctacgggaccgacttcattgccgataaggtggattatctggacaccaaggcaccaggcgggtcaaatcaggaataagggcacattgccccggcgtgagtcggggcaatcccgcaaggagggtgaatgaatcggacgtttgaccggaaggcatacaggcaagaactgatcgacgcggggttttccgccgaggatgccgaaaccatcgcaagccgcaccgtcatgcgtgcgccccgcgaaaccttccagtccgtcggctcgatggtccagcaagctacggccaagatcgagcgcgacagcgtgcaactggctccccctgccctgcccgcgccatcggccgccgtggagcgttcgcgtcgtctcgaacaggaggcggcaggtttggcgaagtcgatgaccatcgacacgcgaggaactatgacgaccaagaagcgaaaaaccgccggcgaggacctggcaaaacaggtcagcgaggccaagcaggccgcgttgctgaaacacacgaagcagcagatcaaggaaatgcagctttccttgttcgatattgcgccgtggccggacacgatgcgagcgatgccaaacgacacggcccgctctgccctgttcaccacgcgcaacaagaaaatcccgcgcgaggcgctgcaaaacaaggtcattttccacgtcaacaaggacgtgaagatcacctacaccggcgtcgagctgcgggccgacgatgacgaactggtgtggcagcaggtgttggagtacgcgaagcgcacccctatcggcgagccgatcaccttcacgttctacgagctttgccaggacctgggctggtcgatcaatggccggtattacacgaaggccgaggaatgcctgtcgcgcctacaggcgacggcgatgggcttcacgtccgaccgcgttgggcacctggaatcggtgtcgctgctgcaccgcttccgcgtcctggaccgtggcaagaaaacgtcccgttgccaggtcctgatcgacgaggaaatcgtcgtgctgtttgctggcgaccactacacgaaattcatatgggagaagtaccgcaagctgtcgccgacggcccgacggatgttcgactatttcagctcgcaccgggagccgtacccgctcaagctggaaaccttccgcctcatgtgcggatcggattccacccgcgtgaagaagtggcgcgagcaggtcggcgaagcctgcgaagagttgcgaggcagcggcctggtggaacacgcctgggtcaatgatgacctggtgcattgcaaacgctagggccttgtggggtcagttccggctgggggttcagcagccagcgctttactggcatttcaggaacaagcgggcactgctcgacgcacttgcttcgctcagtatcgctcgggacgcacggcgcgctctacgaactgccgatagacaactgtcacggttaagcgagaaatgaataagaaggctgataattcggatctctgcgagggagatgatatttgatcacaggcagcaacgctctgtcatcgttacaatcaacatgctaccctccgcgagatcatccgtgtttcaaacccggcagcttagttgccgttcttccgaatagcatcggtaacatgagcaaagtctgccgccttacaacggctctcccgctgacgccgtcccggactgatgggctgcctgtatcgagtggtgattttgtgccgagctgccggtcggggagctgttggctggctggtggcaggatatattgtggtgtaaacaaattgacgcttagacaacttaataacacattgcggacgtttttaatgtactggggtggtttttcttttcaccagtgagacgggcaacagctgattgcccttcaccgcctggccctgagagagttgcagcaagcggtccacgctggtttgccccagcaggcgaaaatcctgtttgatggtggttccgaaatcggcaaaatcccttataaatcaaaagaatagcccgagatagggttgagtgttgttccagtttggaacaagagtccactattaaagaacgtggactccaacgtcaaagggcgaaaaaccgtctatcagggcgatggcccacggccgctctagaactagtggatcccccctacgtgcgatctagtaacatagatgacaccgcgcgcgataatttatcctagtttgcgcgctatattttgttttctatcgcgtattaaatgtataattgcgggactctaatcataaaaacccatctcataaataacgtcatgcattacatgttaattattacatgcttaacgtaattcaacagaaattatatgataatcatcgcaagaccggcaacaggattcaatcttaagaaactttattgccaaatgtttgaacgatccctcagaagaactcgtcaagaaggcgatagaaggcgatgcgctgcgaatcgggagcggcgataccgtaaagcacgaggaagcggtcagcccattcgccgccaagctcttcagcaatatcacgggtagccaacgctatgtcctgatagcggtccgccacacccagccggccacagtcgatgaatccagaaaagcggccattttccaccatgatattcggcaagcaggcatcgccatgggtcacgacgagatcctcgccgtcgggcatgcgcgccttgagcctggcgaacagttcggctggcgcgagcccctgatgctcttcgtccagatcatcctgatcgacaagaccggcttccatccgagtacgtgctcgctcgatgcgatgtttcgcttggtggtcgaatgggcaggtagccggatcaagcgtatgcagccgccgcattgcatcagccatgatggatactttctcggcaggagcaaggtgagatgacaggagatcctgccccggcacttcgcccaatagcagccagtcccttcccgcttcagtgacaacgtcgagcacagctgcgcaaggaacgcccgtcgtggccagccacgatagccgcgctgcctcgtcctggagttcattcagggcaccggacaggtcggtcttgacaaaaagaaccgggcgcccctgcgctgacagccggaacacggcggcatcagagcagccgattgtctgttgtgcccagtcatagccgaatagcctctccacccaagcggccggagaacctgcgtgcaatccatcttgttcaatcatctgttaatcagaaaaactcagattaatcgacaaattcgatcgcacaaactagaaactaacaccagatctagatagaaatcacaaatcgaagagtaattattcgacaaaactcaaattatttgaacaaatcggatgatatttatgaaaccctaatcgagaattaagatgatatctaacgatcaaacccagaaaatcgtcttcgatctaagattaacagaatctaaaccaaagaacatatacgaaattgggatcgaacgaaaacaaaatcgaagattttgagagaataaggaacacagaaatttaccttgatcacggtagagagaattgagagaaagtttttaagattttgagaaattgaaatctgaattgtgaagaagaagagctctttgggtattgttttatagaagaagaagaagaaaagacgaggacgactaggtcacgagaaagctaaggcggtgaagcaatagctaataataaaatgacacgtgtattgagcgttgtttacacgcaaagttgtttttggctaattgccttatttttaggttgaggaaaagtatttgtgctttgagttgataaacacgactcgtgtgtgccggctgcaaccactttgacgccgtttattactgactcgtcgacaaccacaatttctaacggtcgtcataagatccagccgttgagatttaacgatcgttacgatttatatttttttagcattatcgttttattttttaaatatacggtggagctgaaaattggcaataattgaaccgtgggtcccactgcattgaagcgtatttcgtattttctagaattcttcgtgctttatttcttttcctttttgtttttttttgccatttatctaatgcaagtgggcttataaaatcagtgaatttcttggaaaagtaacttctttatcgtataacatattgtgaaattatccatttcttttaattttttagtgttattggatatttttgtatgattattgatttgcataggataatgacttttgtatcaagttggtgaacaagtctcgttaaaaaaggcaagtggtttggtgactcgatttattcttgttatttaattcatatatcaatggatcttatttggggcctggtccatatttaacactcgtgttcagtccaatgaccaataatattttttcattaataacaatgtaacaagaatgatacacaaaacattctttgaataagttcgctatgaagaagggaacttatccggtcctagatcatcagttcatacaaacctccatagagttcaacatcttaaacaaggatatcctgatccgttgacggcgcgccaagcggccgcaaaacccctcacaaatacataaaaaaaattctttatttaattatcaaactctccactacctttcccaccaaccgttacaatcctgaatgttggaaaaaactaactacattgatataaaaaaactacattacttcctaaatcatatcaaaattgtataaatatatccactcaaaggagtctagaagatccacttggacaaattgcccatagttggaaagatgttcaccaagtcaacaagatttatcaatggaaaaatccatctaccaaacttactttcaagaaaatccaaggattatagagtaaaaaatctatgtattattaagtcaaaaagaaaaccaaagtgaacaaatattgatgtacaagtttgagaggataagacattggaatcgtctaaccaggaggcggaggaattccctagacagttaaaagtggccggaatcccggtaaaaaagattaaaatttttttgtagagggagtgcttgaatcatgttttttatgatggaaatagattcagcaccatcaaaaacattcaggacacctaaaattttgaagtttaacaaaaataacttggatctacaaaaatccgtatcggattttctctaaatataactagaattttcataactttcaaagcaactcctcccctaaccgtaaaacttttcctacttcaccgttaattacattccttaagagtagataaagaaataaagtaaataaaagtattcacaaaccaacaatttatttcttttatttacttaaaaaaacaaaaagtttatttattttacttaaatggcataatgacatatcggagatccctcgaacgagaatcttttatctccctggttttgtattaaaaagtaatttattgtggggtccacgcggagttggaatcctacagacgcgctttacatacgtctcgagaagcgtgacggatgtgcgaccggatgaccctgtataacccaccgacacagccagcgcacagtatacacgtgtcatttctctattggaaaatgtcgttgttatccccgctggtacgcaaccaccgatggtgacaggtcgtctgttgtcgtgtcgcgtagcgggagaagggtctcatccaacgctattaaatactcgccttcaccgcgttacttctcatcttttctcttgcgttgtataatcagtgcgatattctcagagagcttttcattcaaaggtatggagttttgaagggctttactcttaacatttgtttttctttgtaaattgttaatggtggtttctgtgggggaagaatcttttgccaggtccttttgggtttcgcatgtttatttgggttatttttctcgactatggctgacattactagggctttcgtgctttcatctgtgttttcttcccttaataggtctgtctctctggaatatttaattttcgtatgtaagttatgagtagtcgctgtttgtaataggctcttgtctgtaaaggtttcagcaggtgtttgcgttttattgcgtcatgtgtttcagaaggcctttgcagattattgcgttgtactttaatattttgtctccaaccttgttatagtttccctcctttgatctcacaggaaccctttcttctttgagcattttcttgtggcgttctgtagtaatattttaattttgggcccgggttctgagggtaggtgattattcacagtgatgtgctttccctataaggtcctctatgtgtaagctgttagggtttgtgcgttactattgacatgtcacatgtcacatattttcttcctcttatccttcgaactgatggttctttttctaattcgtggattgctggtgccatattttatttctattgcaactgtattttagggtgtctctttctttttgatttcttgttaatatttgtgttcaggttgtaactatgggttgctagggtgtctgccctcttcttttgtgcttctttcgcagaatctgtccgttggtctgtatttgggtgatgaattatttattccttgaagtatctgtctaattagcttgtgatgatgtgcaggtatattcgttagtcatatttcaatttcaagcgatcccccgggctgcagaacaattcggcacgaggctggacaacacactatatagatttataaaattatatacagaggagatatccaattgcaggcagcttcccttctctttctcggcccttattttattctgtctctgccagaatcttctccagacaatggccaggccttgaggcttcagaaccatcctcgaatgtggaaaattcgacgattctgaagagcttatactctgtctcttctcagatcctgttggcaaaaaatggggaggcaaccttgctgtgacaaagtgggattgaagaagggtccatggactgcagaggaagacagaaaactggtgaattttatcaccctgcatggccatggatgctggcgcgaagtacccaaacttgctggtctgcttagatgtggcaagagttgtagattgcgttggacaaattacttgcgcccagatttgaagcgtggattattgtctgaatcagaggagaagctcatcattgatctacatgctgccatagggaataggtggtcacgaatcgctgcgcaattgccagggagaactgataacgagatcaagaattactggaacacgaggatcaagaagaaactgcgccagatgggaatcgatcctgtgactcacaagcctctcacccaaatgcaaatgcagagcacccctgcccagactctgctgctgcaagaaaatgatacagagcagcagcagcaggagcaacataatgagcctgatcctgatcagaatcagagcagcaatggcactgtggagacattggtctcgagggcgagagaaccccacgacgacatagagcctctgcagaatttcaacatggaggattcgaattttaacatggaggattcgatgcaattgttcaatgtctgctcgcccaccagcgggataagcctgtctgggagaaccgaggaggtcgattcagatgattctgatcaggtctccaagagcttcggcaatggcagcagtacccattctcagtacattgggcgagaaacctctggtgtcaaggccgaatgtggtttgtctggttgggatcagatggctggcgttttgggcgatcccctttctgagtggaatgtcgatttggaggcctgggctgctggattggatgcccctgcggcctctgcctctgcatggattcagcagctccctgactgccaatggaacgacttccaaggcgattttgagatctgcagcagcaagtcatgtccggagactctgcagagactggggccctttcttgatgacgatgaattgtgaaaaaggagatccaagaatctctttgtttctctcagaaagacactgtacattaaccaagtaaatatggaggaggaggatgagacctaatagttaaatatatatttatatatatagatatgagttaatgtgaatgaacttgtgtgtatctaattcattcattcattccatgtaaaagataccccatggtttaaactttgccatcttcataaattccaactctcagtcatcccatgtaacagataccacatggttttaaccttgccatcttcataaattccaattctcagtcattccatgtagcagataccacatggtttaaaccttgccatcttcataaattccaactctcagtttgtcacttctcagggtgaattgttaattatggtgttcagctttttattactgtttttaacctctcatactgtattgttagctatggggtgtctattaattatttatttatgacacttctcatggtcaattgttaacatagtattcagcttcttattattgtttttaactcctcatactgtattgttagctatggggtgtccatcaattatttatgactctcgtttgcatttaaaaaaaaaaaaaaaaaactcgagagtacttaaagcttccatcgatgggtgttatttgtggataataaattcgggtgatgttcagtgtttgtcgtatttctcacgaataaattgtgtttatgtatgtgttagtgttgtttgtctgtttcagaccctcttatgttatatttttcttttcgtcggtcagttgaagccaatactggtgtcctggccggcactgcaataccatttcgtttaatataaagactctgttatccgtgagctcgaatttccccgatcgttcaaacatttggcaataaagtttcttaagattgaatcctgttgccggtcttgcgatgattatcatataatttctgttgaattacgttaagcatgtaataattaacatgtaatgcatgacgttatttatgagatgggtttttatgattagagtcccgcaattatacatttaatacgcgatagaaaacaaaatatagcgcgcaaactaggataaattatcgcgcgcggtgtcatctatgttactagatcgcggccgcatttaaatgggccctgttaactggtaccttaattaaaagtttaaactatcagtgtttgacaggatatattggcgggtaaacctaagagaaaagagcgtttattagaataatcggatatttaaaagggcgtgaaaaggtttatccgttcgtccatttgtatgtgcatgccaaccacagggttccccagatc

SEQ ID NO: 2380 - DNA, 10769 bp, Artificial Sequence
  Plasmid pOX8
cgccggcgttgtggatacctcgcggaaaacttggccctcactgacagatgaggggcggacgttgacacttgaggggccgactcacccggcgcggcgttgacagatgaggggcaggctcgatttcggccggcgacgtggagctggccagcctcgcaaatcggcgaaaacgcctgattttacgcgagtttcccacagatgatgtggacaagcctggggataagtgccctgcggtattgacacttgaggggcgcgactactgacagatgaggggcgcgatccttgacacttgaggggcagagtgctgacagatgaggggcgcacctattgacatttgaggggctgtccacaggcagaaaatccagcatttgcaagggtttccgcccgtttttcggccaccgctaacctgtcttttaacctgcttttaaaccaatatttataaaccttgtttttaaccagggctgcgccctgtgcgcgtgaccgcgcacgccgaaggggggtgcccccccttctcgaaccctcccggcccgctaacgcgggcctcccatccccccaggggctgcgcccctcggccgcgaacggcctcaccccaaaaatggcagcgctggcagtccataattgtggtttcaaaatcggctccgtcgatactatgttatacgccaactttgaaaacaactttgaaaaagctgttttctggtatttaaggttttagaatgcaaggaacagtgaattggagttcgtcttgttataattagcttcttggggtatctttaaatactgtagaaaagaggaaggaaataataaatggctaaaatgagaatatcaccggaattgaaaaaactgatcgaaaaataccgctgcgtaaaagatacggaaggaatgtctcctgctaaggtatataagctggtgggagaaaatgaaaacctatatttaaaaatgacggacagccggtataaagggaccacctatgatgtggaacgggaaaaggacatgatgctatggctggaaggaaagctgcctgttccaaaggtcctgcactttgaacggcatgatggctggagcaatctgctcatgagtgaggccgatggcgtcctttgctcggaagagtatgaagatgaacaaagccctgaaaagattatcgagctgtatgcggagtgcatcaggctctttcactccatcgacatatcggattgtccctatacgaatagcttagacagccgcttagccgaattggattacttactgaataacgatctggccgatgtggattgcgaaaactgggaagaagacactccatttaaagatccgcgcgagctgtatgattttttaaagacggaaaagcccgaagaggaacttgtcttttcccacggcgacctgggagacagcaacatctttgtgaaagatggcaaagtaagtggctttattgatcttgggagaagcggcagggcggacaagtggtatgacattgccttctgcgtccggtcgatcagggaggatatcggggaagaacagtatgtcgagctattttttgacttactggggatcaagcctgattgggagaaaataaaatattatattttactggatgaattgttttagtacctagatgtggcgcaacgatgccggcgacaagcaggagcgcaccgacttcttccgcatcaagtgttttggctctcaggccgaggcccacggcaagtatttgggcaaggggtcgctggtattcgtgcagggcaagattcggaataccaagtacgagaaggacggccagacggtctacgggaccgacttcattgccgataaggtggattatctggacaccaaggcaccaggcgggtcaaatcaggaataagggcacattgccccggcgtgagtcggggcaatcccgcaaggagggtgaatgaatcggacgtttgaccggaaggcatacaggcaagaactgatcgacgcggggttttccgccgaggatgccgaaaccatcgcaagccgcaccgtcatgcgtgcgccccgcgaaaccttccagtccgtcggctcgatggtccagcaagctacggccaagatcgagcgcgacagcgtgcaactggctccccctgccctgcccgcgccatcggccgccgtggagcgttcgcgtcgtctcgaacaggaggcggcaggtttggcgaagtcgatgaccatcgacacgcgaggaactatgacgaccaagaagcgaaaaaccgccggcgaggacctggcaaaacaggtcagcgaggccaagcaggccgcgttgctgaaacacacgaagcagcagatcaaggaaatgcagctttccttgttcgatattgcgccgtggccggacacgatgcgagcgatgccaaacgacacggcccgctctgccctgttcaccacgcgcaacaagaaaatcccgcgcgaggcgctgcaaaacaaggtcattttccacgtcaacaaggacgtgaagatcacctacaccggcgtcgagctgcgggccgacgatgacgaactggtgtggcagcaggtgttggagtacgcgaagcgcacccctatcggcgagccgatcaccttcacgttctacgagctttgccaggacctgggctggtcgatcaatggccggtattacacgaaggccgaggaatgcctgtcgcgcctacaggcgacggcgatgggcttcacgtccgaccgcgttgggcacctggaatcggtgtcgctgctgcaccgcttccgcgtcctggaccgtggcaagaaaacgtcccgttgccaggtcctgatcgacgaggaaatcgtcgtgctgtttgctggcgaccactacacgaaattcatatgggagaagtaccgcaagctgtcgccgacggcccgacggatgttcgactatttcagctcgcaccgggagccgtacccgctcaagctggaaaccttccgcctcatgtgcggatcggattccacccgcgtgaagaagtggcgcgagcaggtcggcgaagcctgcgaagagttgcgaggcagcggcctggtggaacacgcctgggtcaatgatgacctggtgcattgcaaacgctagggccttgtggggtcagttccggctgggggttcagcagccagcgctttactggcatttcaggaacaagcgggcactgctcgacgcacttgcttcgctcagtatcgctcgggacgcacggcgcgctctacgaactgccgatagacaactgtcacggttaagcgagaaatgaataagaaggctgataattcggatctctgcgagggagatgatatttgatcacaggcagcaacgctctgtcatcgttacaatcaacatgctaccctccgcgagatcatccgtgtttcaaacccggcagcttagttgccgttcttccgaatagcatcggtaacatgagcaaagtctgccgccttacaacggctctcccgctgacgccgtcccggactgatgggctgcctgtatcgagtggtgattttgtgccgagctgccggtcggggagctgttggctggctggtggcaggatatattgtggtgtaaacaaattgacgcttagacaacttaataacacattgcggacgtttttaatgtactggggtggtttttcttttcaccagtgagacgggcaacagctgattgcccttcaccgcctggccctgagagagttgcagcaagcggtccacgctggtttgccccagcaggcgaaaatcctgtttgatggtggttccgaaatcggcaaaatcccttataaatcaaaagaatagcccgagatagggttgagtgttgttccagtttggaacaagagtccactattaaagaacgtggactccaacgtcaaagggcgaaaaaccgtctatcagggcgatggcccacggccgctctagaactagtggatcccccctacgtgcgatctagtaacatagatgacaccgcgcgcgataatttatcctagtttgcgcgctatattttgttttctatcgcgtattaaatgtataattgcgggactctaatcataaaaacccatctcataaataacgtcatgcattacatgttaattattacatgcttaacgtaattcaacagaaattatatgataatcatcgcaagaccggcaacaggattcaatcttaagaaactttattgccaaatgtttgaacgatccctcagaagaactcgtcaagaaggcgatagaaggcgatgcgctgcgaatcgggagcggcgataccgtaaagcacgaggaagcggtcagcccattcgccgccaagctcttcagcaatatcacgggtagccaacgctatgtcctgatagcggtccgccacacccagccggccacagtcgatgaatccagaaaagcggccattttccaccatgatattcggcaagcaggcatcgccatgggtcacgacgagatcctcgccgtcgggcatgcgcgccttgagcctggcgaacagttcggctggcgcgagcccctgatgctcttcgtccagatcatcctgatcgacaagaccggcttccatccgagtacgtgctcgctcgatgcgatgtttcgcttggtggtcgaatgggcaggtagccggatcaagcgtatgcagccgccgcattgcatcagccatgatggatactttctcggcaggagcaaggtgagatgacaggagatcctgccccggcacttcgcccaatagcagccagtcccttcccgcttcagtgacaacgtcgagcacagctgcgcaaggaacgcccgtcgtggccagccacgatagccgcgctgcctcgtcctggagttcattcagggcaccggacaggtcggtcttgacaaaaagaaccgggcgcccctgcgctgacagccggaacacggcggcatcagagcagccgattgtctgttgtgcccagtcatagccgaatagcctctccacccaagcggccggagaacctgcgtgcaatccatcttgttcaatcatctgttaatcagaaaaactcagattaatcgacaaattcgatcgcacaaactagaaactaacaccagatctagatagaaatcacaaatcgaagagtaattattcgacaaaactcaaattatttgaacaaatcggatgatatttatgaaaccctaatcgagaattaagatgatatctaacgatcaaacccagaaaatcgtcttcgatctaagattaacagaatctaaaccaaagaacatatacgaaattgggatcgaacgaaaacaaaatcgaagattttgagagaataaggaacacagaaatttaccttgatcacggtagagagaattgagagaaagtttttaagattttgagaaattgaaatctgaattgtgaagaagaagagctctttgggtattgttttatagaagaagaagaagaaaagacgaggacgactaggtcacgagaaagctaaggcggtgaagcaatagctaataataaaatgacacgtgtattgagcgttgtttacacgcaaagttgtttttggctaattgccttatttttaggttgaggaaaagtatttgtgctttgagttgataaacacgactcgtgtgtgccggctgcaaccactttgacgccgtttattactgactcgtcgacaaccacaatttctaacggtcgtcataagatccagccgttgagatttaacgatcgttacgatttatatttttttagcattatcgttttattttttaaatatacggtggagctgaaaattggcaataattgaaccgtgggtcccactgcattgaagcgtatttcgtattttctagaattcttcgtgctttatttcttttcctttttgtttttttttgccatttatctaatgcaagtgggcttataaaatcagtgaatttcttggaaaagtaacttctttatcgtataacatattgtgaaattatccatttcttttaattttttagtgttattggatatttttgtatgattattgatttgcataggataatgacttttgtatcaagttggtgaacaagtctcgttaaaaaaggcaagtggtttggtgactcgatttattcttgttatttaattcatatatcaatggatcttatttggggcctggtccatatttaacactcgtgttcagtccaatgaccaataatattttttcattaataacaatgtaacaagaatgatacacaaaacattctttgaataagttcgctatgaagaagggaacttatccggtcctagatcatcagttcatacaaacctccatagagttcaacatcttaaacaaggatatcctgatccgttgacggcgcgccaagcggccgcggccgggtggtgacatttattcataaattcatctcaaaacaagaaggatttacaaaaataaaagaaaacaaaattttcatctttaacataattataattgtgttcacaaaattcaaacttaaacccttaatataaagaatttctttcaacaatacactttaatcacaacttcttcaatcacaacctcctccaacaaaattaaaatagattaataaataaataaacttaactatttaaaaaaaaatattatacaaaatttattaaaacttcaaaataaacaaactttttatacaaaattcatcaaaactttaaaataaagctaaacactgaaaatgtgagtacatttaaaaggacgctgatcacaaaaattttgaaaacataaacaaacttgaaactctaccttttaagaatgagtttgtcgtctcattaactcattagttttatagttcgaatccaattaacgtatcttttattttatggaataagggtgttttaataagtgattttgggatttttttagtaatttatttgtgatatgttatggagtttttaaaaatatatatatatatatatatttttgggttgagtttacttaaaatttggaaaaggttggtaagaactataaattgagttgtgaatgagtgttttatggattttttaagatgttaaatttatatatgtaattaaaattttattttgaataacaaaaattataattggataaaaaattgttttgttaaatttagagtaaaaatttcaaaatctaaaataattaaacactattatttttaaaaaatttgttggtaaattttatcttatatttaagttaaaatttagaaaaaattaattttaaattaataaacttttgaagtcaaatattccaaatattttccaaaatattaaatctattttgcattcaaaatacaatttaaataataaaacttcatggaatagattaaccaatttgtataaaaaccaaaaatctcaaataaaatttaaattacaaaacattatcaacattatgatttcaagaaagacaataaccagtttccaataaaataaaaaacctcatggcccgtaattaagatctcattaattaattcttattttttaatttttttacatagaaaatatctttatattgtatccaagaaatatagaatgttctcgtccagggactattaatctccaaacaagtttcaaaatcattacattaaagctcatcatgtcatttgtggattggaaattatattgtataagagaaatatagaatgttctcgtctagggactattaatttccaaacaaatttcaaaatcattacattaaagctcatcatgtcatttgtggattggaaattagacaaaaaaaatcccaaatatttctctcaatctcccaaaatatagttcgaactccatatttttggaaattgagaatttttttacccaataatatatttttttatacattttagagattttccagacatatttgctctgggatttattggaatgaaggttgagttataaactttcagtaatccaagtatcttcggtttttgaagatactaaatccattatataataaaaacacattttaaacaccaatttaatgggatttcagatttgtatcccatgctattggctaaggcatttttcttattgtaatctaaccaattctaatttccacctggtgtgaactgactgacaaatgcggtccgaaaacagcgaatgaaatgtctgggtgatcggtcaaacaagcggtgggcgagagagcgcgggtgttggcctagccgggatgggggtaggtagacggcgtattaccggcgagttgtccgaatggagttttcggggtaggtagtaacgtagacgtcaatggaaaaagtcataatctccgtcaaaaatccaaccgctccttcacatcgcagagttggtggccacgggaccctccacccactcactcgatcgcctgccgtggttgcccattattcaaccatacgccacttgactcttcaccaacaattccaggccggctttctatacaatgtactgcacaggaaaatccaatataaaaagccggcctctgcttccttctcagtagcccccagctcattcaattcttcccactgcaggctacatttgtcagacacgttttccgccatttttcgcctgtttctgcggagaatttgatcaggttcggattgggattgaatcaattgaaaggtttttattttcagtatttcgatcgccggatcccccaattcggcacgaggctggacaacacactatatagatttataaaattatatacagaggagatatccaattgcaggcagcttcccttctctttctcggcccttattttattctgtctctgccagaatcttctccagacaatggccaggccttgaggcttcagaaccatcctcgaatgtggaaaattcgacgattctgaagagcttatactctgtctcttctcagatcctgttggcaaaaaatggggaggcaaccttgctgtgacaaagtgggattgaagaagggtccatggactgcagaggaagacagaaaactggtgaattttatcaccctgcatggccatggatgctggcgcgaagtacccaaacttgctggtctgcttagatgtggcaagagttgtagattgcgttggacaaattacttgcgcccagatttgaagcgtggattattgtctgaatcagaggagaagctcatcattgatctacatgctgccatagggaataggtggtcacgaatcgctgcgcaattgccagggagaactgataacgagatcaagaattactggaacacgaggatcaagaagaaactgcgccagatgggaatcgatcctgtgactcacaagcctctcacccaaatgcaaatgcagagcacccctgcccagactctgctgctgcaagaaaatgatacagagcagcagcagcaggagcaacataatgagcctgatcctgatcagaatcagagcagcaatggcactgtggagacattggtctcgagggcgagagaaccccacgacgacatagagcctctgcagaatttcaacatggaggattcgaattttaacatggaggattcgatgcaattgttcaatgtctgctcgcccaccagcgggataagcctgtctgggagaaccgaggaggtcgattcagatgattctgatcaggtctccaagagcttcggcaatggcagcagtacccattctcagtacattgggcgagaaacctctggtgtcaaggccgaatgtggtttgtctggttgggatcagatggctggcgttttgggcgatcccctttctgagtggaatgtcgatttggaggcctgggctgctggattggatgcccctgcggcctctgcctctgcatggattcagcagctccctgactgccaatggaacgacttccaaggcgattttgagatctgcagcagcaagtcatgtccggagactctgcagagactggggccctttcttgatgacgatgaattgtgaaaaaggagatccaagaatctctttgtttctctcagaaagacactgtacattaaccaagtaaatatggaggaggaggatgagacctaatagttaaatatatatttatatatatagatatgagttaatgtgaatgaacttgtgtgtatctaattcattcattcattccatgtaaaagataccccatggtttaaactttgccatcttcataaattccaactctcagtcatcccatgtaacagataccacatggttttaaccttgccatcttcataaattccaattctcagtcattccatgtagcagataccacatggtttaaaccttgccatcttcataaattccaactctcagtttgtcacttctcagggtgaattgttaattatggtgttcagctttttattactgtttttaacctctcatactgtattgttagctatggggtgtctattaattatttatttatgacacttctcatggtcaattgttaacatagtattcagcttcttattattgtttttaactcctcatactgtattgttagctatggggtgtccatcaattatttatgactctcgtttgcatttaaaaaaaaaaaaaaaaaactcgagagtacttctagcaaagtacttaaagcttgcactaccatgctataacagatactacttatgtatttcttatgctttgtgtgattttgtctctgtcttgtcctcgttaaatttgcttgcatgttgcctttaagcattgttagctaaattatgttgtttctgtgagttcaaatctttgaacaaaatttagggcttacaaaccatgcggccgcggtaccttaattaaaagtttaaactatcagtgtttgacaggatatattggcgggtaaacctaagagaaaagagcgtttattagaataatcggatatttaaaagggcgtgaaaaggtttatccgttcgtccatttgtatgtgcatgccaaccacagggttccccagatc

SEQ ID NO: 2381 - DNA, 10789 bp, Artificial Sequence
  Plasmid pKNC159
cgccggcgttgtggatacctcgcggaaaacttggccctcactgacagatgaggggcggacgttgacacttgaggggccgactcacccggcgcggcgttgacagatgaggggcaggctcgatttcggccggcgacgtggagctggccagcctcgcaaatcggcgaaaacgcctgattttacgcgagtttcccacagatgatgtggacaagcctggggataagtgccctgcggtattgacacttgaggggcgcgactactgacagatgaggggcgcgatccttgacacttgaggggcagagtgctgacagatgaggggcgcacctattgacatttgaggggctgtccacaggcagaaaatccagcatttgcaagggtttccgcccgtttttcggccaccgctaacctgtcttttaacctgcttttaaaccaatatttataaaccttgtttttaaccagggctgcgccctgtgcgcgtgaccgcgcacgccgaaggggggtgcccccccttctcgaaccctcccggcccgctaacgcgggcctcccatccccccaggggctgcgcccctcggccgcgaacggcctcaccccaaaaatggcagcgctggcagtccataattgtggtccaatttgcagccgtccgagacaggaggacatcgtccagctgaaaccggggcagaatccggccatttctgaagagaaaaatggtaaactgatagaataaaatcataagaaaggagccgcacatgaaaaaagcagtcattaacggggaacaaatcagaagtatcagcgacctccaccagacattgaaaaaggagcttgcccttccggaatactacggtgaaaacctggacgctttatgggattgtctgaccggatgggtggagtacccgctcgttttggaatggaggcagtttgaacaaagcaagcagctgactgaaaatggcgccgagagtgtgcttcaggttttccgtgaagcgaaagcggaaggctgcgacatcaccatcatactttcttaatacgatcaatgggagaggaacaatatggaaacacaaaccacaattgtggtttcaaaatcggctccgtcgatactatgttatacgccaactttgaaaacaactttgaaaaagctgttttctggtatttaaggttttagaatgcaaggaacagtgaattggagttcgtcttgttataattagcttcttggggtatctttaaatactgtagaaaagaggaaggaaataataaatggctaaaatgagaatatcaccggaattgaaaaaactgatcgaaaaataccgctgcgtaaaagatacggaaggaatgtctcctgctaaggtatataagctggtgggagaaaatgaaaacctatatttaaaaatgacggacagccggtataaagggaccacctatgatgtggaacgggaaaaggacatgatgctatggctggaaggaaagctgcctgttccaaaggtcctgcactttgaacggcatgatggctggagcaatctgctcatgagtgaggccgatggcgtcctttgctcggaagagtatgaagatgaacaaagccctgaaaagattatcgagctgtatgcggagtgcatcaggctctttcactccatcgacatatcggattgtccctatacgaatagcttagacagccgcttagccgaattggattacttactgaataacgatctggccgatgtggattgcgaaaactgggaagaagacactccatttaaagatccgcgcgagctgtatgattttttaaagacggaaaagcccgaagaggaacttgtcttttcccacggcgacctgggagacagcaacatctttgtgaaagatggcaaagtaagtggctttattgatcttgggagaagcggcagggcggacaagtggtatgacattgccttctgcgtccggtcgatcagggaggatatcggggaagaacagtatgtcgagctattttttgacttactggggatcaagcctgattgggagaaaataaaatattatattttactggatgaattgttttagtacctagatgtggcgcaacgatgccggcgacaagcaggagcgcaccgacttcttccgcatcaagtgttttggctctcaggccgaggcccacggcaagtatttgggcaaggggtcgctggtattcgtgcagggcaagattcggaataccaagtacgagaaggacggccagacggtctacgggaccgacttcattgccgataaggtggattatctggacaccaaggcaccaggcgggtcaaatcaggaataagggcacattgccccggcgtgagtcggggcaatcccgcaaggagggtgaatgaatcggacgtttgaccggaaggcatacaggcaagaactgatcgacgcggggttttccgccgaggatgccgaaaccatcgcaagccgcaccgtcatgcgtgcgccccgcgaaaccttccagtccgtcggctcgatggtccagcaagctacggccaagatcgagcgcgacagcgtgcaactggctccccctgccctgcccgcgccatcggccgccgtggagcgttcgcgtcgtctcgaacaggaggcggcaggtttggcgaagtcgatgaccatcgacacgcgaggaactatgacgaccaagaagcgaaaaaccgccggcgaggacctggcaaaacaggtcagcgaggccaagcaggccgcgttgctgaaacacacgaagcagcagatcaaggaaatgcagctttccttgttcgatattgcgccgtggccggacacgatgcgagcgatgccaaacgacacggcccgctctgccctgttcaccacgcgcaacaagaaaatcccgcgcgaggcgctgcaaaacaaggtcattttccacgtcaacaaggacgtgaagatcacctacaccggcgtcgagctgcgggccgacgatgacgaactggtgtggcagcaggtgttggagtacgcgaagcgcacccctatcggcgagccgatcaccttcacgttctacgagctttgccaggacctgggctggtcgatcaatggccggtattacacgaaggccgaggaatgcctgtcgcgcctacaggcgacggcgatgggcttcacgtccgaccgcgttgggcacctggaatcggtgtcgctgctgcaccgcttccgcgtcctggaccgtggcaagaaaacgtcccgttgccaggtcctgatcgacgaggaaatcgtcgtgctgtttgctggcgaccactacacgaaattcatatgggagaagtaccgcaagctgtcgccgacggcccgacggatgttcgactatttcagctcgcaccgggagccgtacccgctcaagctggaaaccttccgcctcatgtgcggatcggattccacccgcgtgaagaagtggcgcgagcaggtcggcgaagcctgcgaagagttgcgaggcagcggcctggtggaacacgcctgggtcaatgatgacctggtgcattgcaaacgctagggccttgtggggtcagttccggctgggggttcagcagccagcgctttactggcatttcaggaacaagcgggcactgctcgacgcacttgcttcgctcagtatcgctcgggacgcacggcgcgctctacgaactgccgatagacaactgtcacggttaagcgagaaatgaataagaaggctgataattcggatctctgcgagggagatgatatttgatcacaggcagcaacgctctgtcatcgttacaatcaacatgctaccctccgcgagatcatccgtgtttcaaacccggcagcttagttgccgttcttccgaatagcatcggtaacatgagcaaagtctgccgccttacaacggctctcccgctgacgccgtcccggactgatgggctgcctgtatcgagtggtgattttgtgccgagctgccggtcggggagctgttggctggctggtggcaggatatattgtggtgtaaacaaattgacgcttagacaacttaataacacattgcggacgtttttaatgtactggggtggtttttcttttcaccagtgagacgggcaacagctgattgcccttcaccgcctggccctgagagagttgcagcaagcggtccacgctggtttgccccagcaggcgaaaatcctgtttgatggtggttccgaaatcggcaaaatcccttataaatcaaaagaatagcccgagatagggttgagtgttgttccagtttggaacaagagtccactattaaagaacgtggactccaacgtcaaagggcgaaaaaccgtctatcagggcgatggcccacggccgctctagaactagtggatcccccctacgtgcgatctagtaacatagatgacaccgcgcgcgataatttatcctagtttgcgcgctatattttgttttctatcgcgtattaaatgtataattgcgggactctaatcataaaaacccatctcataaataacgtcatgcattacatgttaattattacatgcttaacgtaattcaacagaaattatatgataatcatcgcaagaccggcaacaggattcaatcttaagaaactttattgccaaatgtttgaacgatccctcagaagaactcgtcaagaaggcgatagaaggcgatgcgctgcgaatcgggagcggcgataccgtaaagcacgaggaagcggtcagcccattcgccgccaagctcttcagcaatatcacgggtagccaacgctatgtcctgatagcggtccgccacacccagccggccacagtcgatgaatccagaaaagcggccattttccaccatgatattcggcaagcaggcatcgccatgggtcacgacgagatcctcgccgtcgggcatgcgcgccttgagcctggcgaacagttcggctggcgcgagcccctgatgctcttcgtccagatcatcctgatcgacaagaccggcttccatccgagtacgtgctcgctcgatgcgatgtttcgcttggtggtcgaatgggcaggtagccggatcaagcgtatgcagccgccgcattgcatcagccatgatggatactttctcggcaggagcaaggtgagatgacaggagatcctgccccggcacttcgcccaatagcagccagtcccttcccgcttcagtgacaacgtcgagcacagctgcgcaaggaacgcccgtcgtggccagccacgatagccgcgctgcctcgtcctggagttcattcagggcaccggacaggtcggtcttgacaaaaagaaccgggcgcccctgcgctgacagccggaacacggcggcatcagagcagccgattgtctgttgtgcccagtcatagccgaatagcctctccacccaagcggccggagaacctgcgtgcaatccatcttgttcaatcatctgttaatcagaaaaactcagattaatcgacaaattcgatcgcacaaactagaaactaacaccagatctagatagaaatcacaaatcgaagagtaattattcgacaaaactcaaattatttgaacaaatcggatgatatttatgaaaccctaatcgagaattaagatgatatctaacgatcaaacccagaaaatcgtcttcgatctaagattaacagaatctaaaccaaagaacatatacgaaattgggatcgaacgaaaacaaaatcgaagattttgagagaataaggaacacagaaatttaccttgatcacggtagagagaattgagagaaagtttttaagattttgagaaattgaaatctgaattgtgaagaagaagagctctttgggtattgttttatagaagaagaagaagaaaagacgaggacgactaggtcacgagaaagctaaggcggtgaagcaatagctaataataaaatgacacgtgtattgagcgttgtttacacgcaaagttgtttttggctaattgccttatttttaggttgaggaaaagtatttgtgctttgagttgataaacacgactcgtgtgtgccggctgcaaccactttgacgccgtttattactgactcgtcgacaaccacaatttctaacggtcgtcataagatccagccgttgagatttaacgatcgttacgatttatatttttttagcattatcgttttattttttaaatatacggtggagctgaaaattggcaataattgaaccgtgggtcccactgcattgaagcgtatttcgtattttctagaattcttcgtgctttatttcttttcctttttgtttttttttgccatttatctaatgcaagtgggcttataaaatcagtgaatttcttggaaaagtaacttctttatcgtataacatattgtgaaattatccatttcttttaattttttagtgttattggatatttttgtatgattattgatttgcataggataatgacttttgtatcaagttggtgaacaagtctcgttaaaaaaggcaagtggtttggtgactcgatttattcttgttatttaattcatatatcaatggatcttatttggggcctggtccatatttaacactcgtgttcagtccaatgaccaataatattttttcattaataacaatgtaacaagaatgatacacaaaacattctttgaataagttcgctatgaagaagggaacttatccggtcctagatcatcagttcatacaaacctccatagagttcaacatcttaaacaaggatatcctgatccgttgacggcgcgccaagcggccgcatttaaatgggccctatctaatcgaattttgtaaactggtttgataagccatcaatgcatcagtcaagaatgaatcattgcaactaagttgatataattcaatttaccatagaactcaaatgttgatatcttcttatggattttctgatcttctacattattagaaagaaacttgatttaccagtaatgatgatacatatccaatagaacgaaataagccaatctttataggttttggtagtaaagttacaacatcagagacatgtatgtattgtctctcagaagagctcttgaccgatcagagtttgaagaaaaatttattacacactttatgtaaagctgaaaaaaacggcctcccgcagggaagccgtttttttcgttatctgatttttgtaaaggtctgatactcgtccgttgttttgtaaatcagccagtcgcttgagtaaagaatccggtctgaatttctgaagcctgatgtatagttaatatccgcttcacgccatgttcgtccgcttttgcccgggagtttgccttccctgtttgagaagatgtctccgccgatgcttttccccggagcgacgtctgcaaggttcccttttgatgccacccagccgagggcttgtgcttctgattttgtaatgtaattatcaggtagcttatgatatgtctgaagataatccgcaaccccgtcaaacgtgttgataacctgtgccataaatcttctaaaaacagcagaactgactattcaaagaaagtagaacccacagaaagtaatcaaagtagtttgattaaatgcgttgtgtatcatcgcagcccctgctacggatatttataggaaaggtttgagagcaatgtgtgcagcaagttgtgtgtgaatcacctgcttccatggcggaggataaataatttagtcacgcatttagttgaacgtaactactaactcctctaccgctaatcattcttcttttgcccgggcaagttcaacaacaaccccacaatcacgcttcctgtattttgttttgttttcaaaacaatagaattcactttttactgccaaaattatgttttactcgagagcccgggctcctgcaattgaagcttctgttatcctgatccgttgacggcgcgccaagcggccgcaaaacccctcacaaatacataaaaaaaattctttatttaattatcaaactctccactacctttcccaccaaccgttacaatcctgaatgttggaaaaaactaactacattgatataaaaaaactacattacttcctaaatcatatcaaaattgtataaatatatccactcaaaggagtctagaagatccacttggacaaattgcccatagttggaaagatgttcaccaagtcaacaagatttatcaatggaaaaatccatctaccaaacttactttcaagaaaatccaaggattatagagtaaaaaatctatgtattattaagtcaaaaagaaaaccaaagtgaacaaatattgatgtacaagtttgagaggataagacattggaatcgtctaaccaggaggcggaggaattccctagacagttaaaagtggccggaatcccggtaaaaaagattaaaatttttttgtagagggagtgcttgaatcatgttttttatgatggaaatagattcagcaccatcaaaaacattcaggacacctaaaattttgaagtttaacaaaaataacttggatctacaaaaatccgtatcggattttctctaaatataactagaattttcataactttcaaagcaactcctcccctaaccgtaaaacttttcctacttcaccgttaattacattccttaagagtagataaagaaataaagtaaataaaagtattcacaaaccaacaatttatttcttttatttacttaaaaaaacaaaaagtttatttattttacttaaatggcataatgacatatcggagatccctcgaacgagaatcttttatctccctggttttgtattaaaaagtaatttattgtggggtccacgcggagttggaatcctacagacgcgctttacatacgtctcgagaagcgtgacggatgtgcgaccggatgaccctgtataacccaccgacacagccagcgcacagtatacacgtgtcatttctctattggaaaatgtcgttgttatccccgctggtacgcaaccaccgatggtgacaggtcgtctgttgtcgtgtcgcgtagcgggagaagggtctcatccaacgctattaaatactcgccttcaccgcgttacttctcatcttttctcttgcgttgtataatcagtgcgatattctcagagagcttttcattcaacccgggctgcagaacaattggctagtggatccaaagaattcggcacgaggccccgcctcttcttatactagtgcctttatcggttccattcaaacttgctcacggattccgacccttccggctaaagctgcttcatttctgtgtgtattgaagatggggagatctccctgctgtgaaaaagctcatacaaacaaaggggcgtggaccaaagaagaggacgatcgcctcatcgcccacattcgaactcacggcgaaggttgctggcgctcgcttcccaaggccgcagggctgatgcgctgcgggaagagctgcaggctccgatggataaactacctgcgtcctgatctgaagcgtggaaacttctcagaagaagaagacgaactcatcatcaaactccactccctactcggcaacaagtggtctcttattgcaggcagattgcccgggcggacggacaacgagataaagaactactggaatactcacatcaagagaaaattgctaaacaggggactcgacccccagtcccatcgccccctcggccagccgcacaacagcaacacgacctgcccctctctgcccgccctcgagcacgaaattcttgtgttccagaggccaagaacgccggagatagcagatttctttcaatacgagcgctctgaaagctcgccgatggaaccggccacttctaaagacgcggaagagcatcccgacctcaatcttgatttgtgtatcagcttgccagttcattcgccccccgccacgagcagagcttcgagcgtcgatggaaccgtggattcaaaacctaattcggtttcttgtcacatggggttgcaagtaaattatggtgtgcaatgtgagaacagatattgtgaagagagtgcttccggtgtctcgagtttttacacgctcgtcttatagaagatttgagctttatggtttgcttattaacaccactaagcattcatctgatgaataggcagagtgaaactatatgtttgctcattgtggcagcccggagtttgcagttaatagacagggacgcagctggacagcagttacccaaattattgtttaaagagtgtagatagctcacctatgaacataggaatcgctgtttcaccatggcgctctgtaatatttaaagcgattcatatggaagcttgagcgcgaagtctccagtgccgtatcatcaactaatgtaattgaactgcaattggtcacatgcccgtgtaaataatgaaactatgagtttcatattttccaagttttactcgctgttccgcacagctttttttatatatgtatttggcttgtattgaatatcatatttatttgaagatgtaatttgcggtttgtatggattaaaaaaaaaactcgagagtacttaaagcttgcactaccatgctataacagatactacttatgtatttcttatgctttgtgtgattttgtctctgtcttgtcctcgttaaatttgcttgcatgttgcctttaagcattgttagctaaattatgttgtttctgtgagttcaaatctttgaacaaaatttagggcttacaaaccatgcggccgcggtaccttaattaaaagtttaaactatcagtgtttgacaggatatattggcgggtaaacctaagagaaaagagcgtttattagaataatcggatatttaaaagggcgtgaaaaggtttatccgttcgtccatttgtatgtgcatgccaaccacagggttccccagatc

SEQ ID NO: 2382 - DNA, 1038 bp, Eucalyptus grandis
caatcacagagagagagagagagagagagagagagagagagagaatggcatttgcaggaacaacccagaagtgcatggcctgtgagaagacagtctatctggtggacaagctcacagctgacaatagaatctaccacaaggcctgcttcagatgccaccattgcaaagggactctcaagcttgggaactataattcatttgaaggagtcttgtactgccggccgcatttcgatcagctcttcaagagaactggcagcctcgaaaaaagctttgaaggaacccccaagattgcaaagccagagaaacccgtcgatggagagagacctgcagcgaccaaagcctccagtatgttcgggggaacgcgagacaaatgtgtaggctgtaagagcaccgtctacccgaccgaaaaggtgacggttaatgggactccataccacaagagctgcttcaaatgcacccacggggggtgcgtgatcagcccatccaactacgtcgcgcacgaggggaaactctactgcaggcaccaccacactcagctcataaaggagaagggcaatctcagccaactcgagggcgatcatgagagggaaacaatggctcctgaatcataaaacgctttgatcttgcactaccttgttcgttgagctgtcaccacactttgtggccagcggatttcaggctggtccaaaaacctgttatgctattagagaatctatgtccatctactaaatttgagatgtgtgagccttgaccggtttgatttggcttctgttttgcgattgcggatgatttctcgggttggttgtaagcgtagaataagtggtgcttgcttcttgactttgtgaaacctctgagcttgctttcttttcagtcttgtccagcgagtgtgtctagcatcatccctatttttcattcattcgactcacttttgtcagtgtccttgaagagtcttcatttactatggttgtgaattcgaagtgaaacttctcgacgaaaaatagcatgatttagttctaggtttgaagaacaaaaaaaaaa

SEQ ID NO: 2383 - protein, 188 aa, Eucalyptus grandis; identical to SEQ ID NO: 606

SEQ ID NO: 2384 - DNA, 16170 bp, Artificial Sequence
  Plasmid pARB490
tcgacggatcttttccgctgcataaccctgcttcggggtcattatagcgattttttcggtatatccatcctttttcgcacgatatacaggattttgccaaagggttcgtgtagactttccttggtgtatccaacggcgtcagccgggcaggataggtgaagtaggcccacccgcgagcgggtgttccttcttcactgtcccttattcgcacctggcggtgctcaacgggaatcctgctctgcgaggctggccggctaccgccggcgtaacagatgagggcaagcggatggctgatgaaaccaagccaaccaggggtgatgctgccaacttactgatttagtgtatgatggtgtttttgaggtgctccagtggcttctgtttctatcagctgtccctcctgttcagctactgacggggtggtgcgtaacggcaaaagcaccgccggacatcagcgctatctctgctctcactgccgtaaaacatggcaactgcagttcacttacaccgcttctcaacccggtacgcaccagaaaatcattgatatggccatgaatggcgttggatgccgggcaacagcccgcattatgggcgttggcctcaacacgattttacgtcacttaaaaaactcaggccgcagtcggtaacctcgcgcatacagccgggcagtgacgtcatcgtctgcgcggaaatggacgaacagtggggctatgtcggggctaaatcgcgccagcgctggctgttttacgcgtatgacagtctccggaagacggttgttgcgcacgtattcggtgaacgcactatggcgacgctggggcgtcttatgagcctgctgtcaccctttgacgtggtgatatggatgacggatggctggccgctgtatgaatcccgcctgaagggaaagctgcacgtaatcagcaagcgatatacgcagcgaattgagcggcataacctgaatctgaggcagcacctggcacggctgggacggaagtcgctgtcgttctcaaaatcggtggagctgcatgacaaagtcatcgggcattatctgaacataaaacactatcaataagttggagtcattacccaaccaggaagggcagcccacctatcaaggtgtactgccttccagacgaacgaagagcgattgaggaaaaggcggcggcggccggcatgagcctgtcggcctacctgctggccgtcggccagggctacaaaatcacgggcgtcgtggactatgagcacgtccgcgagctggcccgcatcaatggcgacctgggccgcctgggcggcctgctgaaactctggctcaccgacgacccgcgcacggcgcggttcggtgatgccacgatcctcgccctgctggcgaagatcgaagagaagcaggacgagcttggcaaggtcatgatgggcgtggtccgcccgagggcagagccatgacttttttagccgctaaaacggccggggggtgcgcgtgattgccaagcacgtccccatgcgctccatcaagaagagcgacttcgcggagctggtattcgtgcagggcaagattcggaataccaagtacgagaaggacggccagacggtctacgggaccgacttcattgccgataaggtggattatctggacaccaaggcaccaggcgggtcaaatcaggaataagggcacattgccccggcgtgagtcggggcaatcccgcaaggagggtgaatgaatcggacgtttgaccggaaggcatacaggcaagaactgatcgacgcggggttttccgccgaggatgccgaaaccatcgcaagccgcaccgtcatgcgtgcgccccgcgaaaccttccagtccgtcggctcgatggtccagcaagctacggccaagatcgagcgcgacagcgtgcaactggctccccctgccctgcccgcgccatcggccgccgtggagcgttcgcgtcgtctcgaacaggaggcggcaggtttggcgaagtcgatgaccatcgacacgcgaggaactatgacgaccaagaagcgaaaaaccgccggcgaggacctggcaaaacaggtcagcgaggccaagcaggccgcgttgctgaaacacacgaagcagcagatcaaggaaatgcagctttccttgttcgatattgcgccgtggccggacacgatgcgagcgatgccaaacgacacggcccgctctgccctgttcaccacgcgcaacaagaaaatcccgcgcgaggcgctgcaaaacaaggtcattttccacgtcaacaaggacgtgaagatcacctacaccggcgtcgagctgcgggccgacgatgacgaactggtgtggcagcaggtgttggagtacgcgaagcgcacccctatcggcgagccgatcaccttcacgttctacgagctttgccaggacctgggctggtcgatcaatggccggtattacacgaaggccgaggaatgcctgtcgcgcctacaggcgacggcgatgggcttcacgtccgaccgcgttgggcacctggaatcggtgtcgctgctgcaccgcttccgcgtcctggaccgtggcaagaaaacgtcccgttgccaggtcctgatcgacgaggaaatcgtcgtgctgtttgctggcgaccactacacgaaattcatatgggagaagtaccgcaagctgtcgccgacggcccgacggatgttcgactatttcagctcgcaccgggagccgtacccgctcaagctggaaaccttccgcctcatgtgcggatcggattccacccgcgtgaagaagtggcgcgagcaggtcggcgaagcctgcgaagagttgcgaggcagcggcctggtggaacacgcctgggtcaatgatgacctggtgcattgcaaacgctagggccttgtggggtcagttccggctgggggttcagcagccagcgctttactggcatttcaggaacaagcgggcactgctcgacgcacttgcttcgctcagtatcgctcgggacgcacggcgcgctctacgaactgccgataaacagaggattaaaattgacaattgtgattaaggctcagattcgacggcttggagcggccgacgtgcaggatttccgcgagatccgattgtcggccctgaagaaagctccagagatgttcgggtccgtttacgagcacgaggagaaaaagcccatggaggcgttcgctgaacggttgcgagatgccgtggcattcggcgcctacatcgacggcgagatcattgggctgtcggtcttcaaacaggaggacggccccaaggacgctcacaaggcgcatctgtccggcgttttcgtggagcccgaacagcgaggccgaggggtcgccggtatgctgctgcgggcgttgccggcgggtttattgctcgtgatgatcgtccgacagattccaacgggaatctggtggatgcgcatcttcatcctcggcgcacttaatatttcgctattctggagcttgttgtttatttcggtctaccgcctgccgggcggggtcgcggcgacggtaggcgctgtgcagccgctgatggtcgtgttcatctctgccgctctgctaggtagcccgatacgattgatggcggtcctgggggctatttgcggaactgcgggcgtggcgctgttggtgttgacaccaaacgcagcgctagatcctgtcggcgtcgcagcgggcctggcgggggcggtttccatggcgttcggaaccgtgctgacccgcaagtggcaacctcccgtgcctctgctcacctttaccgcctggcaactggcggccggaggacttctgctcgttccagtagctttagtgtttgatccgccaatcccgatgcctacaggaaccaatgttctcggcctggcgtggctcggcctgatcggagcgggtttaacctacttcctttggttccgggggatctcgcgactcgaacctacagttgtttccttactgggctttctcagccgggatggcgctaagaagctattgccgccgatcttcatatgcggtgtgaaataccgcacagatgcgtaaggagaaaataccgcatcaggcgctcttccgcttcctcgctcactgactcgctgcgctcggtcgttcggctgcggcgagcggtatcagctcactcaaaggcggtaatacggttatccacagaatcaggggataacgcaggaaagaacatgtgagcaaaaggccagcaaaaggccaggaaccgtaaaaaggccgcgttgctggcgtttttccataggctccgcccccctgacgagcatcacaaaaatcgacgctcaagtcagaggtggcgaaacccgacaggactataaagataccaggcgtttccccctggaagctccctcgtgcgctctcctgttccgaccctgccgcttaccggatacctgtccgcctttctcccttcgggaagcgtggcgctttctcaatgctcacgctgtaggtatctcagttcggtgtaggtcgttcgctccaagctgggctgtgtgcacgaaccccccgttcagcccgaccgctgcgccttatccggtaactatcgtcttgagtccaacccggtaagacacgacttatcgccactggcagcagccactggtaacaggattagcagagcgaggtatgtaggcggtgctacagagttcttgaagtggtggcctaactacggctacactagaaggacagtatttggtatctgcgctctgctgaagccagttaccttcggaaaaagagttggtagctcttgatccggcaaacaaaccaccgctggtagcggtggtttttttgtttgcaagcagcagattacgcgcagaaaaaaaggatctcaagaagatcctttgatcttttctacggggtctgacgctcagtggaacgaaaactcacgttaagggattttggtcatgagattatcaaaaaggatcttcacctagatccttttaaattaaaaatgaagttttaaatcaatctaaagtatatatgagtaaacttggtctgacagttaccaatgcttaatcagtgaggcacctatctcagcgatctgtctatttcgttcatccatagttgcctgactccccgtcgtgtagataactacgatacgggagggcttaccatctggccccagtgctgcaatgataccgcgagacccacgctcaccggctccagatttatcagcaataaaccagccagccggaagggccgagcgcagaagtggtcctgcaactttatccgcctccatccagtctattaaacaagtggcagcaacggattcgcaaacctgtcacgccttttgtgccaaaagccgcgccaggtttgcgatccgctgtgccaggcgttaggcgtcatatgaagatttcggtgatccctgagcaggtggcggaaacattggatgctgagaaccatttcattgttcgtgaagtgttcgatgtgcacctatccgaccaaggctttgaactatctaccagaagtgtgagcccctaccggaaggattacatctcggatgatgactctgatgaagactctgcttgctatggcgcattcatcgaccaagagcttgtcgggaagattgaactcaactcaacatggaacgatctagcctctatcgaacacattgttgtgtcgcacacgcaccgaggcaaaggagtcgcgcacagtctcatcgaatttgcgaaaaagtgggcactaagcagacagctccttggcatacgattagagacacaaacgaacaatgtacctgcctgcaatttgtacgcaaaatgtggctttactctcggcggcattgacctgttcacgtataaaactagacctcaagtctcgaacgaaacagcgatgtactggtactggttctcgggagcacaggatgacgcctaacaattcattcaagccgacaccgcttcgcggcgcggcttaattcaggagttaaacatcatgagggaagcggtgatcgccgaagtatcgactcaactatcagaggtagttggcgtcatcgagcgccatctcgaaccgacgttgctggccgtacatttgtacggctccgcagtggatggcggcctgaagccacacagtgatattgatttgctggttacggtgaccgtaaggcttgatgaaacaacgcggcgagctttgatcaacgaccttttggaaacttcggcttcccctggagagagcgagattctccgcgctgtagaagtcaccattgttgtgcacgacgacatcattccgtggcgttatccagctaagcgcgaactgcaatttggagaatggcagcgcaatgacattcttgcaggtatcttcgagccagccacgatcgacattgatctggctatcttgctgacaaaagcaagagaacatagcgttgccttggtaggtccagcggcggaggaactctttgatccggttcctgaacaggatctatttgaggcgctaaatgaaaccttaacgctatggaactcgccgcccgactgggctggcgatgagcgaaatgtagtgcttacgttgtcccgcatttggtacagcgcagtaaccggcaaaatcgcgccgaaggatgtcgctgccgactgggcaatggagcgcctgccggcccagtatcagcccgtcatacttgaagctaggcaggcttatcttggacaagaagatcgcttggcctcgcgcgcagatcagttggaagaatttgttcactacgtgaaaggcgagatcaccaaggtagtcggcaaataatgtctaacaattcgttcaagccgacgccgcttcgcggcgcggcttaactcaagcgttagagagctggggaagactatgcgcgatctgttgaaggtggttctaagcctcgtacttgcgatggcatcggggcaggcacttgctgacctgccaattgttttagtggatgaagctcgtcttccctatgactactccccatccaactacgacatttctccaagcaactacgacaactccataagcaattacgacaatagtccatcaaattacgacaactctgagagcaactacgataatagttcatccaattacgacaatagtcgcaacggaaatcgtaggcttatatatagcgcaaatgggtctcgcactttcgccggctactacgtcattgccaacaatgggacaacgaacttcttttccacatctggcaaaaggatgttctacaccccaaaaggggggcgcggcgtctatggcggcaaagatgggagcttctgcggggcattggtcgtcataaatggccaattttcgcttgccctgacagataacggcctgaagatcatgtatctaagcaactagcctgctctctaataaaatgttaggagcttggctgccatttttggggtgaggccgttcgcggccgaggggcgcagcccctggggggatgggaggcccgcgttagcgggccgggagggttcgagaagggggggcaccccccttcggcgtgcgcggtcacgcgccagggcgcagccctggttaaaaacaaggtttataaatattggtttaaaagcaggttaaaagacaggttagcggtggccgaaaaacgggcggaaacccttgcaaatgctggattttctgcctgtggacagcccctcaaatgtcaataggtgcgcccctcatctgtcagcactctgcccctcaagtgtcaaggatcgcgcccctcatctgtcagtagtcgcgcccctcaagtgtcaataccgcagggcacttatccccaggcttgtccacatcatctgtgggaaactcgcgtaaaatcaggcgttttcgccgatttgcgaggctggccagctccacgtcgccggccgaaatcgagcctgcccctcatctgtcaacgccgcgccgggtgagtcggcccctcaagtgtcaacgtccgcccctcatctgtcagtgagggccaagttttccgcgaggtatccacaacgccggcggccggccgcggtgtctcgcacacggcttcgacggcgtttctggcgcgtttgcagggccatagacggccgccagcccagcggcgagggcaaccagcccggtgagcgtcggaaagggtcgacatcttgctgcgttcggatattttcgtggagttcccgccacagacccggattgaaggcgagatccagcaactcgcgccagatcatcctgtgacggaactttggcgcgtgatgactggccaggacgtcggccgaaagagcgacaagcagatcacgattttcgacagcgtcggatttgcgatcgaggatttttcggcgctgcgctacgtccgcgaccgcgttgagggatcaagccacagcagcccactcgaccttctagccgacccagacgagccaagggatctttttggaatgctgctccgtcgtcaggctttccgacgtttgggtggttgaacagaagtcattatcgtacggaatgccaagcactcccgaggggaaccctgtggttggcatgcacatacaaatggacgaacggataaaccttttcacgcccttttaaatatccgattattctaataaacgctcttttctcttaggtttacccgccaatatatcctgtcaaacactgatagtttaaactgaaggcgggaaacgacaatctgatcatgagcggagaattaagggagtcacgttatgacccccgccgatgacgcgggacaagccgttttacgtttggaactgacagaaccgcaacgattgaaggagccactcaggcggccgcaaaacccctcacaaatacataaaaaaaattctttatttaattatcaaactctccactacctttcccaccaaccgttacaatcctgaatgttggaaaaaactaactacattgatataaaaaaactacattacttcctaaatcatatcaaaattgtataaatatatccactcaaaggagtctagaagatccacttggacaaattgcccatagttggaaagatgttcaccaagtcaacaagatttatcaatggaaaaatccatctaccaaacttactttcaagaaaatccaaggattatagagtaaaaaatctatgtattattaagtcaaaaagaaaaccaaagtgaacaaatattgatgtacaagtttgagaggataagacattggaatcgtctaaccaggaggcggaggaattccctagacagttaaaagtggccggaatcccggtaaaaaagattaaaatttttttgtagagggagtgcttgaatcatgttttttatgatggaaatagattcagcaccatcaaaaacattcaggacacctaaaattttgaagtttaacaaaaataacttggatctacaaaaatccgtatcggattttctctaaatataactagaattttcataactttcaaagcaactcctcccctaaccgtaaaacttttcctacttcaccgttaattacattccttaagagtagataaagaaataaagtaaataaaagtattcacaaaccaacaatttatttcttttatttacttaaaaaaacaaaaagtttatttattttacttaaatggcataatgacatatcggagatccctcgaacgagaatcttttatctccctggttttgtattaaaaagtaatttattgtggggtccacgcggagttggaatcctacagacgcgctttacatacgtctcgagaagcgtgacggatgtgcgaccggatgaccctgtataacccaccgacacagccagcgcacagtatacacgtgtcatttctctattggaaaatgtcgttgttatccccgctggtacgcaaccaccgatggtgacaggtcgtctgttgtcgtgtcgcgtagcgggagaagggtctcatccaacgctattaaatactcgccttcaccgcgttacttctcatcttttctcttgcgttgtataatcagtgcgatattctcagagagcttttcattcaaaggtatggagttttgaagggctttactcttaacatttgtttttctttgtaaattgttaatggtggtttctgtgggggaagaatcttttgccaggtccttttgggtttcgcatgtttatttgggttatttttctcgactatggctgacattactagggctttcgtgctttcatctgtgttttcttcccttaataggtctgtctctctggaatatttaattttcgtatgtaagttatgagtagtcgctgtttgtaataggctcttgtctgtaaaggtttcagcaggtgtttgcgttttattgcgtcatgtgtttcagaaggcctttgcagattattgcgttgtactttaatattttgtctccaaccttgttatagtttccctcctttgatctcacaggaaccctttcttctttgagcattttcttgtggcgttctgtagtaatattttaattttgggcccgggttctgagggtaggtgattattcacagtgatgtgctttccctataaggtcctctatgtgtaagctgttagggtttgtgcgttactattgacatgtcacatgtcacatattttcttcctcttatccttcgaactgatggttctttttctaattcgtggattgctggtgccatattttatttctattgcaactgtattttagggtgtctctttctttttgatttcttgttaatatttgtgttcaggttgtaactatgggttgctagggtgtctgccctcttcttttgtgcttctttcgcagaatctgtccgttggtctgtatttgggtgatgaattatttattccttgaagtatctgtctaattagcttgtgatgatgtgcaggtatattcgttagtcatatttcaatttcaagcgatcccccgggcctagaatggcattcgcaggaacaacccagaagtgcatggcctgtgagaagacagtctatctggtggacaagctcacagctgacaatagaatctaccacaaggcctgcttcagatgccaccattgcaaagggactctcaagcttgggaactataattcatttgaaggagtcttgtactgccggccgcatttcgatcagctcttcaagagaactggcagcctcgaaaaaagctttgaaggaacccccaagattgcaaagccagagaaacccgtcgatggagagagacctgcagcgaccaaagcctccagtatgttcgggggaacgcgagacaaatgtgtaggctgtaagagcaccgtctacccgaccgaaaaggtgacggttaatgggactccataccacaagagctgcttcaaatgcacccacggggggtgcgtgatcagcccatccaactacgtcgcgcaggatccgaattggaattcgtccagcagtaattcggtacccctgatcagcactgctgccaagaatgtaagtttttatttcttttatatgttcaaacagttttataaagtactataagctttttttagccaaaagaaatatcttaagttttagtaaccaataaagaattattgcggcctccttatttaattatagtacatatgtcatagtagatgttttttttattattattattttttatttttttatagttttttacaaattcgacttggagaccttatgatttggaagatactccatttaattttatgagttgtgtttgaaaacatattttaagactaaacacgtagagaacattcttaacaaatttgtaaataaataaatttaactctattctctaggatttaaatattataggtatatatataattttctaataagtttatatcgagtcactcatacgagttgtgtagaaagttaatcacgggtaccaattttaaattaaaaataagaataattatatgatcttaaatttatacaactctgataaaagattgggctttgacatctttgaagaaaactagatttagtaatattctgattaaattgggttcacactttgtagtgggcacactttccgggttcgaaatcgaaatctggaagcttatcgaattcggatcctgcgcgacgtagttggatgggctgatcacgcaccccccgtgggtgcatttgaagcagctcttgtggtatggagtcccattaaccgtcaccttttcggtcgggtagacggtgctcttacagcctacacatttgtctcgcgttcccccgaacatactggaggctttggtcgctgcaggtctctctccatcgacgggtttctctggctttgcaatcttgggggttccttcaaagcttttttcgaggctgccagttctcttgaagagctgatcgaaatgcggccggcagtacaagactccttcaaatgaattatagttcccaagcttgagagtccctttgcaatggtggcatctgaagcaggccttgtggtagattctattgtcagctgtgagcttgtccaccagatagactgtcttctcacaggccatgcacttctgggttgttcctgcgaatgccattctagcgatgggtgttatttgtggataataaattcgggtgatgttcagtgtttgtcgtatttctcacgaataaattgtgtttatgtatgtgttagtgttgtttgtctgtttcagaccctcttatgttatatttttcttttcgtcggtcagttgaagccaatactggtgtcctggccggcactgcaataccatttcgtttaatataaagactctgttatccgtgagctcgaatttccccgatcgttcaaacatttggcaataaagtttcttaagattgaatcctgttgccggtcttgcgatgattatcatataatttctgttgaattacgttaagcatgtaataattaacatgtaatgcatgacgttatttatgagatgggtttttatgattagagtcccgcaattatacatttaatacgcgatagaaaacaaaatatagcgcgcaaactaggataaattatcgcgcgcggtgtcatctatgttactagatcgcggccgcatcgataagcttcggatttggagccaagtctcataaacgccattgtggaagaaagtcttgagttggtggtaatgtaacagagtagtaagaacagagaagagagagagtgtgagatacatgaattgtcgggcaacaaaaatcctgaacatcttattttagcaaagagaaagagttccgagtctgtagcagaagagtgaggagaaatttaagctcttggacttgtgaattgttccgcctcttgaatacttcttcaatcctcatatattcttcttctatgttacctgaaaaccggcatttaatctcgcgggtttattccggttcaacattttttttgttttgagttattatctgggcttaataacgcaggcctgaaataaattcaaggcccaactgtttttttttttaagaagttgctgttaaaaaaaaaaaaagggaattaacaacaacaacaaaaaaagataaagaaaataataacaattactttaattgtagactaaaaaaacatagattttatcatgaaaaaaagagaaaagaaataaaaacttggatcaaaaaaaaaaacatacagatcttctaattattaacttttcttaaaaattaggtcctttttcccaacaattaggtttagagttttggaattaaaccaaaaagattgttctaaaaaatactcaaatttggtagataagtttccttattttaattagtcaatggtagatacttttttttcttttctttattagagtagattagaatcttttatgccaagtattgataaattaaatcaagaagataaactatcataatcaacatgaaattaaaagaaaaatctcatatatagtattagtattctctatatatattatgattgcttattcttaatgggttgggttaaccaagacatagtcttaatggaaagaatcttttttgaactttttccttattgattaaattcttctatagaaaagaaagaaattatttgaggaaaagtatatacaaaaagaaaaatagaaaaatgtcagtgaagcagatgtaatggatgacctaatccaaccaccaccataggatgtttctacttgagtcggtcttttaaaaacgcacggtggaaaatatgacacgtatcatatgattccttcctttagtttcgtgataataatcctcaactgatatcttcctttttttgttttggctaaagatattttattctcattaatagaaaagacggttttgggcttttggtttgcgatataaagaagaccttcgtgtggaagataataattcatcctttcgtctttttctgactcttcaatctctcccaaagcctaaagcgatctctgcaaatctctcgcgactctctctttcaaggtatattttctgattctttttgtttttgattcgtatctgatctccaatttttgttatgtggattattgaatcttttgtataaattgcttttgacaatattgttcgtttcgtcaatccagcttctaaattttgtcctgattactaagatatcgattcgtagtgtttacatctgtgtaatttcttgcttgattgtgaaattaggattttcaaggacgatctattcaatttttgtgttttctttgttcgattctctctgttttaggtttcttatgtttagatccgtttctctttggtgttgttttgatttctcttacggcttttgatttggtatatgttcgctgattggtttctacttgttctattgttttatttcagatgcagatccccaactagtactatgattgaacaagatggattgcacgcaggttctccggccgcttgggtggagaggctattcggctatgactgggcacaacagacaatcggctgctctgatgccgccgtgttccggctgtcagcgcaggggcgcccggttctttttgtcaagaccgacctgtccggtgccctgaatgaactccaggacgaggcagcgcggctatcgtggctggccacgacgggcgttccttgcgcagctgtgctcgacgttgtcactgaagcgggaagggactggctgctattgggcgaagtgccggggcaggatctcctgtcatctcaccttgctcctgccgagaaagtatccatcatggctgatgcaatgcggcggctgcatacgcttgatccggctacctgcccattcgaccaccaagcgaaacatcgcatcgagcgagcacgtactcggatggaagccggtcttgtcgatcaggatgatctggacgaagagcatcaggggctcgcgccagccgaactgttcgccaggctcaaggcgcgcatgcccgacggcgaggatctcgtcgtgacccatggcgatgcctgcttgccgaatatcatggtggaaaatggccgcttttctggattcatcgactgtggccggctgggtgtggcggaccgctatcaggacatagcgttggctacccgtgatattgctgaagagcttggcggcgaatgggctgaccgcttcctcgtgctttacggtatcgccgctcccgattcgcagcgcatcgccttctatcgccttcttgacgagttcttctgagagctcgaatttccccgatcgttcaaacatttggcaataaagtttcttaagattgaatcctgttgccggtcttgcgatgattatcatataatttctgttgaattacgttaagcatgtaataattaacatgtaatgcatgacgttatttatgagatgggtttttatgattagagtcccgcaattatacatttaatacgcgatagaaaacaaaatatagcgcgcaaactaggataaattatcgcgcgcggtgtcatctatgttactagatcgggaattcctgcagaattaattcagtacattaaaaacgtccgcaatgtgttattaagttgtctaagcgtcaatttgtttacaccacaatatatcctgccaccagccagccaacagctccccgaccggcagctcggcacaaaatcaccactcgatacaggcagcccatcagtccgggacggcgtcagcgggagagccgttgtaaggcggcagactttgctcatgttaccgatgctattcggaagaacggcaactaagctgccgggtttgaaacacggatgatctcgcggagggtagcatgttgattgtaacgatgacagagcgttgctgcctgtgatcaaatatcatctccctcgcagagatccgaattatcagccttcttattcatttctcgcttaaccgtgacaggctgtcgatcttgagaactatgccgacataataggaaatcgctggataaagccgctgaggaagctgagtggcgctatttctttagaagtgaacgttgacgatg

SEQ ID NO: 2385 - DNA, 1203 bp, Pinus radiata
cttcatctcacaataaaaaccagcagtccagcacgagcacattatccacttccactccagaactcaagcgcagacgtactccaatgaaccacttcttctcttcttactccgatcccagctcctgcagcctcgactttgctgaagcgtcgtcctcctcgtcgccgctgtccgatggcaggagtgctatggtgcccgggaacttttctgatgaggaggtgctcctggcgtcgcaccagccgaagaagcgcgccgggcggaagaagttccaggagacgcgccaccccgtgtaccgcggggtgcggcggcgaagctcgggcaagtgggtctgcgaggtccgcgagcccaacaagaagtcgaggatctggctgggcaccttccccaccgcggagatggctgcgagggcgcacgacgtggcggcgctcgcgctgaggggccggtccgcctgcctcaacttcgcggactccgcgtggcggctgcccgcgccggcgtcggcggacgcaaaggacatacagcaggcggcggcccaggctgcggaggcgttccggccggcggagtccgaggctgaggacgtgatgtcggggtacgagaagaagtcgccttcggaggagggaatgctgtacgacgacgaggacgtcttcgggatgccggggttactcacgaatatggcggaggggatgctcttgcctccaccacaatgcggcggagatgggtacggcggagaggacgacgggaatctggatgcatacgtgtcgttatggaactattccatgtagtcatttctcaatttcagttgtactttttgtggttagggacgactgggatgccgtactaaaatatttttgaatggagtgcggatgaaaggcgaaagcagaaggtattttcggaagccaatcttttggggcgtgccattagatagatgatggagacttcacggctcttctgatgttgggcctccggtagaagaataaaagtaggccatgttcatgttcatggtagcatcggcgttgcatatagtttgataaagagaccgcctgagtcatcatgatcttcgaatgtaatcaagtatcatgtataatgtataaggcaaaatgttggcccatgtaattcttatgggttgtttaggtttaaatgctttttgctctggcccattaagagggtaaatagaacgaccctattgtaaagaaaaaaaaaaaaaaaaaaaaa

SEQ ID NO: 2386 - protein, 220 aa, Pinus radiata
MGQQSLIYSFVARGTVVLAEYTQFTGNFTTIANQCLQKIPASNNKFTYNCDRHTFNYLVEDGYTYCVVADESVGRQLPIAFLERIKDDFKKRYGGGKADTAVAHSLNKDFGPKLKDHMQYCVDHPEEINKLAKVKAQVSEVKGVMMENIEKVLDRGEKIELLVDKTENLRFQAQDFQKQGTQLRRKMWFQNMKVKLVVLGIVFVLILIIWLSICHGFKCH

SEQ ID NO: 2387 - DNA, 3332 bp, Pinus radiata
aatctgaaaccccccttatacacatgcctcttccttcctcattatagcacgtcagtcggctcgttttcctctgagtttgggtttcacttttttgacaagcagccggaacccagttcgaatccccccggtcttggcgcccccaccgcccccgcatactgttgttattgctttagcattcttttaatgcccagcaccgcgtttattgcatttgcattgatgtccttaggctgtgtcgtggttaattattagtaatattgggctcagacagatgaagaagaagaattctgtttttgttcgttttcgatctgtgaggaagaagaatagttttgtctgaatggagcttgtcaatgctgggctgctccctcagctcttccagaggcttggaactattattattactgtgaattaaagagcagaagaagaagaagaagaagcgtttttatacacagagagttttaggggtagtgggatttagtggttggtcactcgggtaatggcagtgacgtctggcaaagagggaaagtcatcaagtatggaccaaggcaagtatgtgcgttacacagctgagcaggtggaggcactggagcgactctaccatgattgtcctaaacccagttctattcgtcgccagcagctcatacgagaatgccccatactgtccaacatagagcccaagcaaatcaaagtctggtttcaaaaccgcaggtgtagggagaagcagcgcaaggaagcttctcgtctccaggctgtgaacagaaagctttctgccatgaacaagctgttaatggaggagaatgaccgcttgcagaaacaagtctcgcagttggtctacgagaatggatatttcaggcagcagttgcagaatgcctccatagcaactacagacactagctgtgagtctgtggttacaagtgttaaacatcaacagcaaaatcacctgacgccccgggatccccccagggatgctagccctgctggactcctttctattgcagaggagactttaacagagtttctttcaaaggctaaaggaaatgctgttgagtggatccagatgcctgggatgaagcctggtccggatgctattggaattgtcactatttcacatgggtgtactggagtagctgcacgagcttgttctcttgttggtatagaccctacaaaggttgcagagattctcaaagatcgcacatcttggcttcgggattgccgaagtgtggatgttcttactgctttctcaactggaaatggaggaacaattgagcttttatacatgcagatgtatgcgccaactactttagcttctgcccgagatttctggactcttagatacacttctgtattggaagatggtagtcttgtggtacgttggatacttcttgcagtaacttggggagttttaagaaaaaatcaagagttctggcctattttccttctgatgttcttgtacttttcttttgttggcatgttcctcgttctgtctttatttcttccccaaatgtagtttttcttgtttcagtcgcatttcggaatcgtttattcttctataattttcttaactaactttggaaaacttccaaaaccttcctcaaaggtttgcgagagatccttgagtggaactcagggaggtcccagcatgcccgcggtgcagcagtttgttagagcagaaatgcaacccagtggatatttgattcggccatgcgaaggtggaggttctctaattcatattgttgaccatatggatttggagccatggagtgttcctgaagtgctacgtccactgtatgaatcatccactgtacttgcccaaaaggttacaatgtcggccttacgccatttgcgtcaaatagcacaagaggtatcttctgatgtggtccttggctggggaagacaacccgctgcattacggacatttagccagagattgtgcaagggtttcaatgaggcagttaatggcttcacagatgatggatggtctttgatgggtaacgacggaatggaggatgtaactattctcgtcaattcatctccaagcaaactgttcggtcaacagtttgcttcttctgatgggcttcctgctcttggtgggggcatcctatgtgccaaggcttctatgctattacagaatgttcctccagcattgcttgttcgtttcttgcgagaacatcgatcagaatgggcagatagtaatattgatgcctattcagcagcctcttggaaggcaaatccttgtactgttccatcctcacgaattggaggttttggaggtggccaggtcatcctcccattagcccatactgtggaacatgaagagtttttggaggttatcaagttggagaatcatggcctgacacaggaagaagctttgctatcgagggatatgtttctgttgcagctttgtagtgggctcgatgaaaatgcagttggggcctgtgctgaacttgtctttgctccaattgatgcatcattagctgacagttctcctttgctcccttctggtttcagagtcattcctttagactctggaatggatggctccagtccaaaccgtacattggatcttgcttcttcccttgaaattggatcagcaggagctcgaacatctgttgattatggtggaaactctggcaacctcagatcagtattgacaattgctttccagttcacttttgagaaccatttacgggagaatgttgcatccatggctcgtcaatatgtgcgtggtgttgtagcatccgtgcagagggttgccatggccctagccccttctcgactgggttcacatcttgggccgaggctacctcctggcaccccagaagcacttacccttgcacgttgggtttgtcagagttacagattccatttgggggtagagcttcttagacctaattctgaggtcaatgaatctctgctgaaaacactttggcaccactctgatgccatcatgtgttgctccttgaagtcattgcctgttttcacctttgcgaatcaggcaggccttgatatgttagaaacaaccctggttgccttgcaagatatatcattagaaaagatacttgacgacaatggccgcaaaagcttttgctcagatattgctcaaattatgcaacagggatatgcttatctacctgctggagtgtgtgtttttagcatgggcaggcctgcttcctatgacagggctattgcttggaaggtcctcaatgatgaggaaaatccccattgcatagcattcatgtttatgaattggtcctttgtttgaccattatttttcattgtacaaagtataccaagtccttgaagttaacttattgaacaaaaaaaaaaaaaaaaaa

SEQ ID NO: 2388 - protein, 846 aa, Pinus radiata
MAVTSGKEGKSSSMDQGKYVRYTAEQVEALERLYHDCPKPSSIRRQQLIRECPILSNIEPKQIKVWFQNRRCREKQRKEASRLQAVNRKLSAMNKLLMEENDRLQKQVSQLVYENGYFRQQLQNASIATTDTSCESVVTSVKHQQQNHLTPRDPPRDASPAGLLSIAEETLTEFLSKAKGNAVEWIQMPGMKPGPDAIGIVTISHGCTGVAARACSLVGIDPTKVAEILKDRTSWLRDCRSVDVLTAFSTGNGGTIELLYMQFFLFQSHFGIVYSSIIFLTNFGKLPKPSSKVCERSLSGTQGGPSMPAVQQFVRAEMQPSGYLIRPCEGGGSLIHIVDHMDLEPWSVPEVLRPLYESSTVLAQKVTMSALRHLRQIAQEVSSDVVLGWGRQPAALRTFSQRLCKGFNEAVNGFTDDGWSLMGNDGMEDVTILVNSSPSKLFGQQFASSDGLPALGGGILCAKASMLLQNVPPALLVRFLREHRSEWADSNIDAYSAASWKANPCTVPSSRIGGFGGGQVILPLAHTVEHEEFLEVIKLENHGLTQEEALLSRDMFLLQLCSGLDENAVGACAELVFAPIDASLADSSPLLPSGFRVIPLDSGMDGSSPNRTLDLASSLEIGSAGARTSVDYGGNSGNLRSVLTIAFQFTFENHLRENVASMARQYVRGVVASVQRVAMALAPSRLGSHLGPRLPPGTPEALTLARWVCQSYRFHLGVELLRPNSEVNESLLKTLWHHSDAIMCCSLKSLPVFTFANQAGLDMLETTLVALQDISLEKILDDNGRKSFCSDIAQIMQQGYAYLPAGVCVFSMGRPASYDRAIAWKVLNDEENPHCIAFMFMNWSFV

SEQ ID NO: 2389 - DNA, 1685 bp, Pinus radiata
ctccttacacacacaattcaatcaatcccctcgccacgccaccgcgttcgcctgttcttcctcctctggatcaacccattcccacagtcctacttcgctcaatccgacggctaatttttgcgaaatctctgtctctttctcttattaccggtttctgattagaaactggcaaaaacagaggatttagcagtacccaactggggaacagagcgttccgaatgatgggtattgttgtttcctgctgtctggtatctcgcatgcgagctctctggagaagcagcttctttcgccataaagttcacatatctctgggcaactactggttttgctagcgattctgaggtgggcatatgctcagcttttaatgctactagaggacaccgtttgaaggagtttttctctgaggagatgatgatgtctggtgggagaatgtatggtgggccgaacgtccttgtcacggccaacgagaacatttcccgctctgcagatgcactggaagctctactttcttctcctgttttcaatggttcaagatctgtagctaatttggaggaggtgataggtaatgtgtcaaaaagatcattttacaattcctttgaccaggaagaaactggagatgaagaccttgatgattgtatccatccaccggagaagaagagaaggctgactgctgaccaagtgcagttcctggaacgaagctttgagatcgaaaacaagttggaacctgagcgcaagatacagctagccaaggagttgggcctccaacctaggcaagttgcagtctggtttcaaaaccggcgggcaaggtggaaaacaaagcagttggaaagggattatgatattctgaaatcacgctatgagaatttgagagttgattatgatagcctgctcaaagaaaaggataaattaagggctgaggttaccttcctaacagacaagctacacgacagtgaccatgaagccctcacaaaggattctgagtctgctgacaagaaagtctatccccagcctgcctcccactctgactgtgttggggagcctgaaagaagtactgctgccaaggatacaccaccaggttgtaaacacgaagatcttctgagctctggaacagatagcagtggggtcctggatgaagatagtcctcaccatgttgactgtggtcattcatccttggaccatgtgaactctcatctttttgaagcagatcagtcagacctctcacatgctgaagaagaagaagaagaagaaggcatgagtgaaaaactgcttcctcagacatacacatatcatcatctcctcaaagtggaagacggtgcttacccagatgcttcaattgcgtacaatgacatgtttgttttggaggatcaagtacagcttccctggtgggactagccataattatgctgctgttatgttcatctgttcgtttcccttgcccagaataagagcagattgatgtaatagcatatgagagctaactctcaaagaaagtagagtactattgacaaggtttagttttacttgcaactgtaagtgttaagaagattttgaagggtggctgcatagacattctcttcactcatgatgtatagcaatttctaatggttttcaggttttctcttatgtatgttgcccaaggtagaggtgaaagagtgaatgcaagcctactttgtttaaaaaaaaaa

SEQ ID NO: 2390 - protein, 327 aa, Pinus radiata
MMMSGGRMYGGPNVLVTANENISRSADALEALLSSPVFNGSRSVANLEEVIGNVSKRSFYNSFDQEETGDEDLDDCIHPPEKKRRLTADQVQFLERSFEIENKLEPERKIQLAKELGLQPRQVAVWFQNRRARWKTKQLERDYDILKSRYENLRVDYDSLLKEKDKLRAEVTFLTDKLHDSDHEALTKDSESADKKVYPQPASHSDCVGEPERSTAAKDTPPGCKHEDLLSSGTDSSGVLDEDSPHHVDCGHSSLDHVNSHLFEADQSDLSHAEEEEEEEGMSEKLLPQTYTYHHLLKVEDGAYPDASIAYNDMFVLEDQVQLPWWD

SEQ ID NO: 2391 - DNA, 3087 bp, Pinus radiata
ccctgtcaaacgctctggcacaattcatattcttccctttgtattgtatcgacagaggaattgtttctcctcgtagagacatttcgtcaaatgctcagtattgtataccgtattttattattgctcccactgcaccacaacacctcagcataggaaaccacatttgctcttcctcccctgtttaaaaacaaaacgctccacatcccccaactgacagagagacctctggctcgcccaccattttatttacacagcagatctccacttctacttccacttccacatccagatcgaaactctgctaacattcctgatgactctattctgctattggtgaggaatgactgtgactgtggtgacagcgcaatcttttggaatggaagcgggcaagtacgttcggtacactgcagagcaggtggaagctctggaacgcctttacaatgactgcccaaagcccagctctctgcgtcgccagcagctcatcagagaatgcccaatcctttcacacatcgagccgaagcaaatcaaagtctggttccagaatcgaagatgtagagagaaacagcgcaaggaggcaagtcgtctccagactgtcaacagaaagctcacagccatgaataagcttcttatggaggagaacgatcgccttcagaagcaagtctcgcagttggtttacgagaatggctatttcagacagcagatacagactgtttctattaccaccacagatactagctgtgagtctgttgttactagcggtccgcatccgcaccacctcacaccccagcatcccccaagggatgctagccccgctggattcctgtctattgcagaggagactttgacgcagtttctttcaaaggctacagagactgctgttgattggatccagatgcccgggatgaagcctggtccggattctataggcattgtgactatttctaacagttgcactggagttgctgcacgagcttgtggctttgcaggtctcgaaccttcaaaggtcgcagatattcttaaagatcgtcccgcttggcttcatgattgtcggcgcctggatgttttgactgcatttcctacgggaaaaggaggggcagtcgagcttctatacacgcaaatgtatgctccaactacattagcccctgctcgggacttattgactctgagatacacatcattgttggaagatggcagccttgtggtttgtgaaaggtcattgactggtactcagagtggtccaaacatgccgcctgtccagcactttgtaagagcacagatgcttcccagtggttatttgatacgtccctgtgaaggtggaggctgtataattcatattgttgatcatatggacttggagccttggagtgttcctgaagttatacgcccactttatgaatcatctgctgtactggcccaaaaaatgaccattacggcattgagacatttgcgtcaagtagctcaagaggtctcaggtgaagtggttcttggttggggtaggcagccagcggctctgcgggcatttagccagagactgtgcaggggtttcaatgatgctgtgaatggctttgcagatgatggttggtctttgttgggtagtgatggggtggaggacgtgatcattgccataaattcatctccaagcaaatttttaagttctcaaattgcttcttctgatggcctttcagctcttaatgggggcattatgtgtgctaaggcatctatgctattacagaatgtgcctccagcactacttgtccgcttcttgcgggaacatcgctcagagtgggctgattgtaacattgatgcttattcttcagctaccatgaaagcaaatgcttacaatgttccaggttcactgggaggcattacagggagtcaagttatccttccactggcacatactgtggaacatgaagagttcttggaagtcatcaaactcgagggacatggtctcacacacgaagaagctttgctgtctaaggatatttttctgttacagctctgtagcggaatagatgaacatgcagctggattctgttctcaacttgtgtttgcaccaattgatgcatcttttgctgatgatgctcctctgctgccctctggtttccgagtaattcctctagaatctggatcagatgtttctcctccaaaccgaactttggatctagcttctgctcttgagattggatctgctggaactcgagcaagtggtgattgtggtgatagcccatgcaatctgagatctgtattgactattgctttccaattcacttatcagaacaatgtgcgagacagtgtagcagccatgactcgccagtatgtccgtaatgttatagcatctgttcagagggttgccattgcactagctccttctcaacagagtcctcatataggaccaagactacctcctggtaccccagaagcacttacgcttactcgttggatttttcagagctacaggatgcatctaggactagagcttattggagataattctgaacccaatgagtctgtgttgaaactcctgtggcaccattcagatggaatcatgtgttgttcctggaagccattgccagttttcacatttgcaaatcaggcagggcttgatatgctggagacaaccttggttgctctgcaagatatatcattggaaaaaatacttgatgagaatggtcgcaagaggctgtgctcagattttacgcaaattatgcagcagggctatgcttatctgccctctggaatatgcatttctagtatgggcaggcctgtttcatatgatcgagctatagcgtggaaggtacttaatgatgaagacgttattcattgcatagctttcatgttcttgaattggtcttttgtgtgaccagttttgggatgtaaattcaatagaaaagtcatgttgggatcttatcatccaaacaaatgggtttactgccttttgaagcgtttgtaactttaagttttatgccagctggacagaacaacccttctaaaagattttaaaggctctaatggatcatgtaagcagcatcttgtggatgcattttctttaattgaaggacagacgcttagttactaaaaaaaaaa

SEQ ID NO: 2392 - protein, 840 aa, Pinus radiata
MTVTVVTAQSFGMEAGKYVRYTAEQVEALERLYNDCPKPSSLRRQQLIRECPILSHIEPKQIKVWFQNRRCREKQRKEASRLQTVNRKLTAMNKLLMEENDRLQKQVSQLVYENGYFRQQIQTVSITTTDTSCESVVTSGPHPHHLTPQHPPRDASPAGFLSIAEETLTQFLSKATETAVDWIQMPGMKPGPDSIGIVTISNSCTGVAARACGFAGLEPSKVADILKDRPAWLHDCRRLDVLTAFPTGKGGAVELLYTQMYAPTTLAPARDLLTLRYTSLLEDGSLVVCERSLTGTQSGPNMPPVQHFVRAQMLPSGYLIRPCEGGGCIIHIVDHMDLEPWSVPEVIRPLYESSAVLAQKMTITALRHLRQVAQEVSGEVVLGWGRQPAALRAFSQRLCRGFNDAVNGFADDGWSLLGSDGVEDVIIAINSSPSKFLSSQIASSDGLSALNGGIMCAKASMLLQNVPPALLVRFLREHRSEWADCNIDAYSSATMKANAYNVPGSLGGITGSQVILPLAHTVEHEEFLEVIKLEGHGLTHEEALLSKDIFLLQLCSGIDEHAAGFCSQLVFAPIDASFADDAPLLPSGFRVIPLESGSDVSPPNRTLDLASALEIGSAGTRASGDCGDSPCNLRSVLTIAFQFTYQNNVRDSVAAMTRQYVRNVIASVQRVAIALAPSQQSPHIGPRLPPGTPEALTLTRWIFQSYRMHLGLELIGDNSEPNESVLKLLWHHSDGIMCCSWKPLPVFTFANQAGLDMLETTLVALQDISLEKILDENGRKRLCSDFTQIMQQGYAYLPSGICISSMGRPVSYDRAIAWKVLNDEDVIHCIAFMFLNWSFV

SEQ ID NO: 2393 - DNA, 2043 bp, Pinus radiata
gcttaggctttttctcatgtttgatatttctgcccactgcactgatcaaggacttgatgatcagggggcactagatacacattgttattcttccagttgttgacttagtaggttttatacataagctgagcttttatcaatggaagccaaaatggcaaacttgaattctgtcacaaacatgccatttgcctgcgagaatggaggttgcaacaagcgtttcaggcccctggttccaaaattaaccctttctccaaacagcgctgctccaatggcgaatgcagtctggtccactcagcagtctcatgatcagtacagccagctgcaacaagctttcagttcggctactagtggtaacagtgtttcagtgtccgctgcagcctgccttctagagccaaagattagcaggttggatggaaaagtagatgacaattccaatcagagaaaccaaattgataggcttatcaaaggtgaccaacaaaacatgaaggaagaacaagcagaaagctgtgcagtacagtctcagccagcagcctctgggactcgatggaatccaacaccagaccagattagaatcctagaaatgttttacaagggaggaatgcgcacccccaatgcagaacaaatcgagcacattacagcacagctgaggcagtatgggaagattgaaggcaagaatgtgttctactggtttcagaaccacaaagccagagaaaggcagaagcaaaagcgtaacagcagcatgcaccaggtagctgctactgcagcaaagaaaactccaacaacaataatggcagataaccctaatgaacttcacaagcccaactccaacggcacatactctctctataatttgcctttcacagcaatgtctgaagattctcggctcatgttcacttcaacgtccttgctaactatgccatgttcaaagggactggcagcctctttggcgcaggtgggtgttgatgtcctaacacctgcaaccaaaagagatgggctagatgtactaaaaaaaagttctcatgggcctccacaagtacagatgaatgaagaaggatcgccatcgaagaacagtatgatatgggattccattaattccagtggagaaggaattataacaaatctggcattgagccaggctgctgctgatatgcctgtgaatgcagtaaactcatgcaaacgaaagaacagattgtggcaagtcatgagtcccaacgaagaacttggcctgcacacagaaagcagctcagaatcaatctgcctgcagacatctaattctgatcccattaatccatctgactatactaacgaagaagaccatcgccaactccagactctgcaactattccccttgcgtccagaagggtccctcaaatctaagggagaaaccaatatggacaactcagtattatccttgcacgttaatccttcttccacttatccatttagagaatttaacaagtctgcagaatcctcgactcagatgggagctgccattttcgaggaacacaagtattccaaggcagctgaattttttcctaacctctctgcagattattccttcttgaattccatgacatgaaattgttgtcgaggaggatttccaatttttgtaccaatatagttttttttttcttttctgaaaaattgttgggttgcttttttccttgaacaaaaatcattagttatcatttcaaagttgcttctgtcacgcgtgcacacacaatctctttacagcaataaaataaatataaagaatagttgcagatccttactgcagggaaaaaaagcagttgagaaaaagagacctgaagttggaagagatagctatgcagagaaaaatgcaactttcctcagcgaatcacataaattgtatattaatttgttaaataactttacgacttttaagcgctaatattgacaaaggtatggttgagattgtgaatgccacattcgtcacttacaaaagtcaggtgaaaggcgcttgaaataaatttaaagaaagatttttattaataatatataaatattgtatcaaaaaaaaaa

SEQ ID NO: 2394 - protein, 479 aa, Pinus radiata
MEAKMANLNSVTNMPFACENGGCNKRFRPLVPKLTLSPNSAAPMANAVWSTQQSHDQYSQLQQAFSSATSGNSVSVSAAACLLEPKISRLDGKVDDNSNQRNQIDRLIKGDQQNMKEEQAESCAVQSQPAASGTRWNPTPDQIRILEMFYKGGMRTPNAEQIEHITAQLRQYGKIEGKNVFYWFQNHKARERQKQKRNSSMHQVAATAAKKTPTTIMADNPNELHKPNSNGTYSLYNLPFTAMSEDSRLMFTSTSLLTMPCSKGLAASLAQVGVDVLTPATKRDGLDVLKKSSHGPPQVQMNEEGSPSKNSMIWDSINSSGEGIITNLALSQAAADMPVNAVNSCKRKNRLWQVMSPNEELGLHTESSSESICLQTSNSDPINPSDYTNEEDHRQLQTLQLFPLRPEGSLKSKGETNMDNSVLSLHVNPSSTYPFREFNKSAESSTQMGAAIFEEHKYSKAAEFFPNLSADYSFLNSMT

SEQ ID NO: 2395 - DNA, 1106 bp, Pinus radiata
aattttttcacttgcagtggaaatagaagcctgcaggtacctctaggctaccggagttcaaatcccgcacgatcacactcccttcttttaacattccgagttcgaatccccggaaacttctcgacatggttaagccctcgcaaaaacagaatatccatgtcaatggcaagccggaaagccgctcactgatgtcgcggcaattcaagggaatccggctaaggaaatggggaaaatgggtgtccgaaattcgaatgcccaattgcagggccaaaatttggctgggctcctacgaatccccagagaaagctgcccgcgcctatgactttgcagcgtattgtctgagaggatccaaggcgaggttcaattttcccgactcaccgccggaaattccttgcgcctcttctctatcgccgtcgcaaatccaagccggtgcggcccggttcgccgcagaagaattccagatgccgtcagatgacgacacggcgtcatcgtcctgcggttctgaagcggaatccgacttgccgccggaaattccatgcgcctcttctgtatcgccgccgccaatccaagccgccgcgcccaggttcgccgcagaagaattccggttgccgtcagatgaggacacggcatcatcgtcctgcggttcggtaacggaatccaacattgacagccaacagatttcggcggagcagggttcggcattttgggattcactattcctggaagatctggataatggcgaatctctaaatttagaggattttcctcccatagatttgacaatggacgatttgggttttcttcttcagccgtcggaagactgggggattttctaaacaaaaatctaagtttggcatggctgcctgaaattttggcatgaaactttgattaatgtagattctcatctgctgaagtttggatgagatttttaagggattgcaacaatggaaaattaaaattgttgcccctacgacaaattatagtgagccgcaggcgcttgaaatggcggcaaatgcggcaattgtctataaataacatttaaatttgatgattcgtttaaaggttaaagctgcagtgcaatttttgtgctaaaaagaaaaaaaaaa

SEQ ID NO: 2396 - protein, 236 aa, Pinus radiata
MVKPSQKQNIHVNGKPESRSLMSRQFKGIRLRKWGKWVSEIRMPNCRAKIWLGSYESPEKAARAYDFAAYCLRGSKARFNFPDSPPEIPCASSLSPSQIQAGAARFAAEEFQMPSDDDTASSSCGSEAESDLPPEIPCASSVSPPPIQAAAPRFAAEEFRLPSDEDTASSSCGSVTESNIDSQQISAEQGSAFWDSLFLEDLDNGESLNLEDFPPIDLTMDDLGFLLQPSEDWGIF

SEQ ID NO: 2397 - DNA, 1001 bp, Pinus radiata
gaattcctagtctcatttcagtgattcactcactgaaattattgttagaatcactgttttggccccagagcttctgcgtcgccaaatatggagatacgcctccagcaggaaaacgaccaggacattgctccgccacacgaagatcgcgtgtcccgccaatttaaaggagtccgaccgcgtaaatgggggatatgggtatcggaaatccggatgccgagatctcgacagaaaatatggctgggctcgtacaaaaagcccgagaaggccgcccgcgcctacgacgccgcagtgtattgtctgagagggtcgaacgccaagttcaatttccccaattctgtgcccgacattccgtctgcgtcttctctttcccgccagcagattcaactcgctgccgccaaatatgcgttggatcagtccccttcaagcccgccgtctctgaacaataataaagaggaacccgcgtcaccgtcgcagtcgtcttcgatttcagaaacggatttgtcgagagacaacccgcggatatcggaggagcggcaggacttggcggtgtggaggtcgctttttgcggcatcagacggcgctgcgttgccgaatttggaaaaaatgccgtcaatagacgatgtatccatgttggacctcgttcggatttcgcagcaacagcaggaggagggttacatcttgacagacctgtggaacttccaagatgtttgagtttttggaacaattaaatctcccttcttttagtcgtttcgaacgtgcgacctcctcctgccccactccgaacgttttgtgcgatttgggaggtcgagtcttcgagtttcggcacgtgctcataatccaaaattctttcggataagaccgcgcggaagttggaaccctgacttgcactgccctccttttgctcgatagttccgtgcatatagatcatctttgactatagtttcgccgtgtcgatttgcgcaaattgatatattgtacttttctatgattatgttatgcac

SEQ ID NO: 2398 - protein, 207 aa, Pinus radiata
MEIRLQQENDQDIAPPHEDRVSRQFKGVRPRKWGIWVSEIRMPRSRQKIWLGSYKKPEKAARAYDAAVYCLRGSNAKFNFPNSVPDIPSASSLSRQQIQLAAAKYALDQSPSSPPSLNNNKEEPASPSQSSSISETDLSRDNPRISEERQDLAVWRSLFAASDGAALPNLEKMPSIDDVSMLDLVRISQQQQEEGYILTDLWNFQDV

SEQ ID NO: 2399 - DNA, 2575 bp, Pinus radiata
cacaaacgaagcttccctggggactaaaaatggccagcacggagattatttgatgaagcacgcgatgacggaacgggaaagtgaaagctagataacgtttcgttttaaatacagcgcggccgaggcggccggtcagtcaacggggtttctagtgcggtcgtctatattttctactctcctttccactctgcaaaatcagaccttcatccattccccacggcattagattcaatccattctattaggctcctttaagcgaggtcgcgggttcgaacccgatcgaatgatgcgaattggataccgtttggtgtagaattctgatagatttcgtgcgatggagggttcacagaacggcagcagcaatgcaccgccccctttcttaacgaagacgtatgatatggtggacgacccggccacgaatgctatggtgtcatggagccccggaagcaacagttttattgtgtggaatcccactgaattctcccgtgttctcctccccacttactttaagcacagcaacttctccagcttcgtcaggcagctgaatacatatggttttcacaaaattgatccagaacggtgggaattcgcaaatgaggggtttctgcgaggtcataggcatttgttgaaaaacattcacaggcgcaagcctgttcatagccacagtcagcagaaaggagagagtttgtctggaggatcatgtgtggaaatcaaacaacttgaagatgagactgagaagcttagacaggaaaaacaagggttggtgctggaattagtcagacttaagcagcaccagcagggtacagaatttgacctgcagtcattggaagagcgattgcagctgatggaacaacggcaacaacgtatgatggcattcttggctaaagctgtgcagaatcccaattttgtagcacagctcgttcaacatcacgataagattgctcatattgctacgacaaacaagaaaagacgactgccaaaacatgacgaggtcttggagattagcgaaaatggatgtaccagtagccaaattgtaagatatgatccaggtaagagtgatgctttcagcagagattctccagataagcttgaaacatccgcggatgcatttaaaaacttttttgatgctgttccagttgatgctcatgagaaagcaaaggattgtggaagtccccaaagtcactcctcagggccaactattacagagatgcatggaaaaccttgtttccctgatatgcctgtctctttaggggtttcggatatttatacatcttcagctttgtcagatttgaactcctcgtctgggttgccagaaatgtctgtatctttgagatcacaagatatacaagcatcagcagggttagtagggtcccttcgatctgacattctatgtaacttgagtttgagtcctcactcttcttcgcttgaattaagtaaaatagatgacgcaacaaaagctatccagtcaggcagtcctgagaatagaagtcttataggatctaagacgggtagcaatgatgggaattcagaagccatagatatggaggtaagattgcgatatggtgcagcaaaaactactgtgcaggagggttcagttaatggtaaggccagagggacaggtaaaagcatgggtgctgagacaaccaggaagcggatcaatgatgtgttttgggaacagtttcttactgagagtccacagccaatagacacagaggggactgattcggagagtcaggagagtagtaaggatcaagacgatgttgtacctgaatatagcaatttctgtaatagaaaggagaatcttgatcaacttacactacagatggggcaactggcatcatcagtaaatctttgacatcagattaagcatgagtattgaagtgactgcggcactaacaacaggagaatataggaatgccagtaaagttaattgtttctgaagaacaccagcgggttctagaatctagcctgtaggtgtatcttatgttgctctgtttgatgcttctttcaagattctactagttatatcggttaaatgcttgcgagagatatgcgaaacagaattctatcaattttttatgcatcactccgtccaaaatgcattgctgcttatttcagcagatgagttgggaatgcaagtaggacttcaggtttgttgatgcaattagcctttctgaaaaccatccactacattagaactttctctccttatgtgtgcatagtgattaaaggatgtcttgtaatattttctctgtagtactggaggctgtttagttaatgtttcatgtcatccattatatgagttacgaatggtttctaattgggaaatgacaatgagctgtcatgcctatagcctagtgatcaaatttgagcagaattttcaaattttgtgaaagctacagtaataagttccatctagcatttagaatttcaaacaactatctttggatgaggagttatttgatgctgtacctatatgttttttgatctgaatgtttcagatgtggcttatcatgctagaggatattattttactttgaaattaatagaaagaatgtggtttttaaaaaaaaaa

SEQ ID NO: 2400 - protein, 506 aa, Pinus radiata
MEGSQNGSSNAPPPFLTKTYDMVDDPATNAMVSWSPGSNSFIVWNPTEFSRVLLPTYFKHSNFSSFVRQLNTYGFHKIDPERWEFANEGFLRGHRHLLKNIHRRKPVHSHSQQKGESLSGGSCVEIKQLEDETEKLRQEKQGLVLELVRLKQHQQGTEFDLQSLEERLQLMEQRQQRMMAFLAKAVQNPNFVAQLVQHHDKIAHIATTNKKRRLPKHDEVLEISENGCTSSQIVRYDPGKSDAFSRDSPDKLETSADAFKNFFDAVPVDAHEKAKDCGSPQSHSSGPTITEMHGKPCFPDMPVSLGVSDIYTSSALSDLNSSSGLPEMSVSLRSQDIQASAGLVGSLRSDILCNLSLSPHSSSLELSKIDDATKAIQSGSPENRSLIGSKTGSNDGNSEAIDMEVRLRYGAAKTTVQEGSVNGKARGTGKSMGAETTRKRINDVFWEQFLTESPQPIDTEGTDSESQESSKDQDDVVPEYSNFCNRKENLDQLTLQMGQLASSVNL

SEQ ID NO: 2401 - DNA, 914 bp, Pinus radiata
cggccttgaacgcaaactgcaagcctcaccatctccacgggcatgtttaatcctaatcacttcacatgaaaaataatataaaacccatatgtacatttgtgctagcctaatgtgagaagttatctgtggattgttcagagggtaagtgaagattcgaaaaacaatggagattgtggggaaggccaaggaagatgtttcactgccaaaagcaactatgaccaagatcatcaaggagatgttaccagcacatgttcgtgtaaccagagatgctcaggatcttctagttgaatgctgtgtagagttcatcaatttaatctcgtcagagtccaatgacatatgctacaaagaggagaaaagaactattgcaccagaacatgttctggaatctctaaagattcttggctttgggagctatattagggaggttaaagctgcttatgagcaacacaggattgagaattgggattgtccaagagcaggaactagatggagtaaaaacagattggaaatgacagaagaggaagctttacttgaacagcagagaatgtttgcagaggctcgtgcacgcatgaatagtggaagtaacacttttcctgggcaatatcaatcccaatcccaatcgcaatcacaatcacagtcacaatcggagtgattaatattgaatttttttcatatcttcatatgaggatcatttataatatttttgattagttgtataaatgccatcatccgatagttaaatttatcagcaatacaaataaatcttaatttctggagattggcaaagcagcattttacttatcctgttcttttcttttaacttgttatccattcttttgtgcctttattgtctgggtaaactattttatcggcaattgcaattccaaatttcagccttttcagtaaaaaaaaaa

SEQ ID NO: 2402 - protein, 162 aa, Pinus radiata
MEIVGKAKEDVSLPKATMTKIIKEMLPAHVRVTRDAQDLLVECCVEFINLISSESNDICYKEEKRTIAPEHVLESLKILGFGSYIREVKAAYEQHRIENWDCPRAGTRWSKNRLEMTEEEALLEQQRMFAEARARMNSGSNTFPGQYQSQSQSQSQSQSQSE

SEQ ID NO: 2403 - DNA, 2962 bp, Pinus radiata
gtttgatggtcttttgtggatgtgatgaagataatttgttgtagtctgggtcagtttgaagggcttcaggttgtggcttagatgtaggcatagtacagattattttgagcatttagcaaaaagaaacgcgcaaaatagccagcgaagggtagaaattttggtccttttcttgtgccaaatggaagaaatggacagtagttatggcgatcttatgcagaggcttcagtcttctattgggacttcatcttccttcattcctaaacagcaattaaataaatctgaaccttcgtctccggctgttagtcaaactcggccccctttcacttcaaacattcagaattttaaccccggaagcaaaaggcaggggattcctccttcacaccctcactttcctcccacttcgcctcactcacaagcattctacagtcaaatgcccgttctacagtcatcggtacaacagaattctcagaatcagcagcattccaatgctagtcctaattctttgcatactcgatcgatgtcccagcctcacatttttaacttggacaacctgcctcctctcaatccctgttcatatcgtgacccttcatccccatctttatcggaccctgtatctggcgatgtttctatggaagatcaagaaggcagctccgcagtcccatcaatttctccacataatcccccttccctcttctccgggagtagaagatctcaaaatcatatgagtgatggcctaccccctagaaaaggacatagacgagcacgcagcgataatccttttacatttatgtccggatcccagtccctctctggagatatccaacaaggttttgggagctcattggagacggcctctgttaaaggaactgctcaaatggatcatctaaatcaatacgtttcctctttggaacgtgaaaaacctaaggcccaagcggtgaaaacagagttgaatcaggaaaggaatagtattcagaatgtagaaggcaccggagaaggagaaacgggcaaaggaggtggtgaagatatggtttctgcttgcattgatgtggaaaaaataaacaacttgaacaaatcgaggccggcaagtggggagttgccggacaatttgaatggagctcaggaagacagtggtggaagtagtgttaaacagaagaacttgaaggatggggaccaattcaccagtagtgatgaagctgacagtgaggtcaatgaattcaacattatgaaaagaagcaattcaggggttggatatgaagataacaaaagaagtggggggcaaggtgatggcaatcagtacaggtcacgtcactctcggagcatctccatggatagcattatgagtaagatgcataacttcagtgaagacttggaacaggaaccgtctcaaggtcggaatgtcagacactcccatagcaattcgatggatggaagtacaaatttcaatgtggaattcgggaatggggaattcagtgcatctgagatgaagaagatcatggccagtgagaaactggcagagcttgcaacggtggatccaaaacgtgtcaaaaggatattggctaatcgccagtcggctgcacgctccaaggaaagaaagatgcgctatatctcagagctggaacgcaaagtccagaccttgcaaactgaggcaacaactttgtccgcacagctgactcttttgcagagggattcagctggactgggcagtcagaaccacgagctcaagttacgcctacaggccatggaacaacaagcgcaacttcgtgatgcattgaatgaggcacttggggaggaggtccaacggttgaaattggccacaggacagctaggtgctggtcaatctggcagtctggctcagcaaatgtccatgaattcatcattatttcaacttcaacagcagggtccacatcatcctctttatcaaatgcagcaacagcagcaacagcagcaacagcaccaagtccaatacagtcaacaacctccagggaaacaaactaatcgaaatgaaattctccaaacctcatacacttctcttcctggtcccgttggatcctcaagcaagccagataattcaaatatgagtgctagccaagggagtgattgttctttctgaacaggttatggtattttgttaccggttatcttattcaccttctttttctcgtcaaagggatgaggactgcgagtggaaggattgtgtatattttattattcagctttcaacaaagctaaacatggtagatttctaggggaagtaatttccgtgaagatctgttttgacaatatgtttcaaattttaaaatcatatttttgttaggccatatattgctctgcttactgattgtagcggctggtggtgcatattaatggaatacataggtcttttaacaatgaaaatcagaaaggaaggtgtggaattttcctgtttattcttccaacttatcatacacgagacctgttgaccagacatgtctgtcaggggtatagaaccaaggctgagaagactatgttacaggtatcaagtggaaattattgacctgtagggaattttgaacaagcttgaggtttcacaacaatcaacacatacaatgagttgccgccctatgagttgcaactgcaaggtataatgttgtctctcaggtgaagatattagttaaataacgtaacggtgtaatttgagagcccgtgtggttcacatagcagacatagtagccatagcagataagatgaaatatatagaatcatatctaaatatggggagtgttgttgcaggactgtcctgagttctttaatatttggaatgtctgaaagttgtctgttttggacagtccattgatttgttcgtacctattattttatgtctatgctttttggaaagcaaaataatgaagagcaattagtctgttgcaatggttgaaagacctaagggaaaaaaaaaaaaaaaaaaaaaaaaaaaaaaaaaaaa

SEQ ID NO: 2404 - protein, 643 aa, Pinus radiata
MEEMDSSYGDLMQRLQSSIGTSSSFIPKQQLNKSEPSSPAVSQTRPPFTSNIQNFNPGSKRQGIPPSHPHFPPTSPHSQAFYSQMPVLQSSVQQNSQNQQHSNASPNSLHTRSMSQPHIFNLDNLPPLNPCSYRDPSSPSLSDPVSGDVSMEDQEGSSAVPSISPHNPPSLFSGSRRSQNHMSDGLPPRKGHRRARSDNPFTFMSGSQSLSGDIQQGFGSSLETASVKGTAQMDHLNQYVSSLEREKPKAQAVKTELNQERNSIQNVEGTGEGETGKGGGEDMVSACIDVEKINNLNKSRPASGELPDNLNGAQEDSGGSSVKQKNLKDGDQFTSSDEADSEVNEFNIMKRSNSGVGYEDNKRSGGQGDGNQYRSRHSRSISMDSIMSKMHNFSEDLEQEPSQGRNVRHSHSNSMDGSTNFNVEFGNGEFSASEMKKIMASEKLAELATVDPKRVKRILANRQSAARSKERKMRYISELERKVQTLQTEATTLSAQLTLLQRDSAGLGSQNHELKLRLQAMEQQAQLRDALNEALGEEVQRLKLATGQLGAGQSGSLAQQMSMNSSLFQLQQQGPHHPLYQMQQQQQQQQQHQVQYSQQPPGKQTNRNEILQTSYTSLPGPVGSSSKPDNSNMSASQGSDCSF

SEQ ID NO: 2405 - DNA, 1712 bp, Pinus radiata
gtgctgccgaaactcgaatcgatatgctttgtggccggttcaaatatttgagctggcttagcttctctggttcagaaatggcggactaaagtaatagtgtgccccgaggtctggtgttcgaatctcgttggcgtgaaaggtcaaatttttctcacgagtttcattgattctgaaaaactggcatagctatggcgatgagcaatgggagattgtgtgaagatttggataggattaaggggccgtggagccccgaggaggacgcgtcgctgcagaggcttgttcagaaatacgggccgaggaactggaccctgataagtaaaggaatcccggggcgatccgggaaatcgtgcaggctacggtggtgcaatcagctgagccctcaggtggagcacagaccttttaccccgtccgaggatgctgctattctgcaggcccacgcgcagcacggcaacaaatgggcaacaattgcccgagccctccccggccgcaccgacaacgcgatcaagaaccactggaactccacgctacggaggcgctgccgggaccccgaaaagggcatcgttgtccacctggacgacgaaatcagcagcttagacgccgctcgcaagcggagcagcgacggcttctcccacgatggcagcagtgcgctggaggacaacggatgtagcagctgggaagtggactccaagcggctgaagagactaggagaactgggaacagagcagggccccgaggttgaagccgaggtcgaggtttcggaccggagcgacgccaacccgggacgcgtgctgtacaggcccgtgccggtcgtgtcttttttcagttcattcgggaaaaccgttgcgaatctacaggaaacggcggccggcgcagtcggtgtcgatccgccgacctcgctgagcctgtcgctgcccggactcgatcccgcgatcccctctccgaagctgtccactcaaaaggactctcacaacaatagcacagttaataacaatattcctattccgccggtggtggaatacatgagagcagacgaggcggtggtggagcgactcagcaccgccgtcaaggccacggtggcaagcatgctaacgcctgttctgaactcgtcgccacgtggctacaacccaccggctgtgagcagcgaccttctggcgctgatgcgggatatggttgcgaaagaagtgcagaaatatatgtccagtcatcaccagcccggcatgtacacaccgctctccccccatcccgagttcttgggagccgctaatctggtgagaaatgttgttctcggcggcgccctgcatctcaacaaatgacaatctcgagttgcaggtgacgagttcgagtctcgggcgcggccgaagggcgcgtgagaaaccaggacctcccacaactttcaaccgaggactcgaaactcaggaatcatgtcgtgtctatgcataataatttttggaatgagaaggtggctgagtgctgtatagagagaaaggcaacgcctacttgccatccacactcggccgttacaataaaattttaagcagcagccattacagaagttgaaatttgctgctgataatagtgtaaagcaaaccaagcaactttttctgctgagaattttaaagttctggaaaatcccttgaaaagctgtgttagaacttggaattttactttctgtttttgaaaaaattagattgaaagttttttcaaaaaaaaaa

SEQ ID NO: 2406 - protein, 374 aa, Pinus radiata
MAMSNGRLCEDLDRIKGPWSPEEDASLQRLVQKYGPRNWTLISKGIPGRSGKSCRLRWCNQLSPQVEHRPFTPSEDAAILQAHAQHGNKWATIARALPGRTDNAIKNHWNSTLRRRCRDPEKGIVVHLDDEISSLDAARKRSSDGFSHDGSSALEDNGCSSWEVDSKRLKRLGELGTEQGPEVEAEVEVSDRSDANPGRVLYRPVPVVSFFSSFGKTVANLQETAAGAVGVDPPTSLSLSLPGLDPAIPSPKLSTQKDSHNNSTVNNNIPIPPVVEYMRADEAVVERLSTAVKATVASMLTPVLNSSPRGYNPPAVSSDLLALMRDMVAKEVQKYMSSHHQPGMYTPLSPHPEFLGAANLVRNVVLGGALHLNK

SEQ ID NO: 2407 - DNA, 1386 bp, Pinus radiata
cgtctgttgctgttggccgaatttggtccttcatgtcttgttccacttcgaccattggccgtcgtccttctcatctgccacaggttttgctttccaaagagcagggcacgagagccattcacggcgaagacgaagaggacttttgggttgtgtgtgcacagaagcaaaatcacgcaaaatacccttgaaatgagttgggagctaacagaatagaagaggagcagcagctagaatcaggatggaggagcctctgcaaattataaattcatctccgatacagcagcagcatgatcatgatgatgatgatcatgggcatgggcatgaggaggaggtaattccccaccctctgcttccccctcctggcgacacttgtattgttccatacatcatgcccgtttccacctctaccgcagaaaaacaccctccccagccaaccaatatcgcctttaacggcccggaaacagaggaagacgacaagaaacgggatagagagcacaagaagcggtccaagaactggaccagggtcgaaaccctcaagcttataaagcttcgaacagaatttgagcccaggttttctcgcagcggaagaaagacggaactctgggacgaaatagctgagtctctgcgaaaagaacagtttttcagggacgcccagcagtgcagagacaaatgggagaaattaatggcgggttttaaagatgttagggagggtttgaaagataggaacgataacccttattatgaggatctccatcctttgctctccggcaaatgcctgcgcagggaaaacctcaagaaggaaggagattctacccataacgagaagtgggacaagttgatggctgcctataaggatgtcatagatgggaaaagagaagaaggcgatctttcctattttgtggaactgagggctattgttggagggaggcctgatgaggggaaagttcaaatagagtcgatgccttgacatatgaaccggattgtatctgttatctggcatatttgatcaatatctccttggattcagctaaatggtagctctatggcctagcacggaggctccttgcgcatcaagcctggtatgcaattactcagagttttctttcttcttgtgccatcaattgttattgtaaggagcatgaatccttccatgggaaacctcttagtgatttatttagaaagtgttaaaaatttcatgcaattgcagttatcaagatatatctctgtgaattatttagatggagggtaggccgctctgctttgtaaaatagtactatatttctgtatttccgggttcaaggccatgctgccaaatccacactctgtgtatattcaattggtatttgcttcaaggaccctactttcttattcttcttaaaaaaaaaa

SEQ ID NO: 2408 - protein, 242 aa, Pinus radiata
MEEPLQIINSSPIQQQHDHDDDDHGHGHEEEVIPHPLLPPPGDTCIVPYIMPVSTSTAEKHPPQPTNIAFNGPETEEDDKKRDREHKKRSKNWTRVETLKLIKLRTEFEPRFSRSGRKTELWDEIAESLRKEQFFRDAQQCRDKWEKLMAGFKDVREGLKDRNDNPYYEDLHPLLSGKCLRRENLKKEGDSTHNEKWDKLMAAYKDVIDGKREEGDLSYFVELRAIVGGRPDEGKVQIESMP

SEQ ID NO: 2409 - DNA, 1635 bp, Pinus radiata
gcattcgcacgtccaggggtctcctgtaaccattccagattatccgcgcactgtgcgacggtggctaattttgctgcttagtagttcaattttctgttttgggtattagttacagtaagagttcacttcagagcactggaatgtttatatgggtttcatttgagaatcccctaaatttgagtttcgattctgctctaggcaagaatagggtgtaaatttgagtttcgattctgctctaggcaagaatagtgtgtatttgtgaaaagagaaagaaatccttatagaaataggatttaggattcatgctctcggacatgggcatggacattgccagaaataattccagttttgtaggattccctggtctggaatgtcccatagagtggggcgaagcagccaagtccttcgacttcagttccattggagacgttttccgcattgaggacttgtctgagttctccaatgaggacattgccggacccatacccagtggctcgctttcttctctttcttctcccgggtcttctcagaacatggccaagcacactgtctgcgcctcttttctcaacgaaggagacttcatttgccctccttacgaagatggaattggtctagaatggctgtcggacttcgtggaggattcctttgcagctacaggaagttcgaattctggttccttggctgacttgtctaaggacaaaatcgacgacaacagggagaagaagaagcagaacccaaccgatgaagcgataatccctgaaataccgcctataaaggagactcccaggtcacagagggcggtgcccgggcgggctcgcagcaagcggcgcagaagctcaggagccccaattcgcggttggtctacttctgaagattacgcattgcagaatgagggcggcatgaaaactgtaacaggagcggacgctataaatcattaccagtcctcggcgccccagcagcagccaaggcgctgcactcattgtctcagccagcgaaccccgcagtggcgattgggcccgttgggtcccaagaccctgtgcaatgcctgcggtgtgaggttcaagtctggcaggctcttccccgaatacaggcctgccaagagccccactttcattcgatacattcattcaaattcccataagaaggtattggagatgcgaaatgaggaaaccaacgatctagaaggtctcgtgttcgatccccatctctcagattccaaacatcaagaccagggactgttgaaggttaaaattaaactcgctggcctagataacttgtcgtctcagagcaactaatgctagtcactcttgtgttacatagctgctacctagaggaaatgacaacacgaaatacgtctgtagcatattagaattgtttttacaactataatctctcttctataataaaatcttctctcttctataataaaatctcccctactatcaaaatgttacagagttcaaaaccattaatacttcatttctgtctaccaaattaatggttttatcttttaaattgctccttgtaattgctggacaggccctcgttctcatttattcttgtgacagtgcagtgtgactgtattcttatatatatagatattatatagtcatttgttttgtcataaaaaaaaaa

SEQ ID NO: 2410 - protein, 330 aa, Pinus radiata
MLSDMGMDIARNNSSFVGFPGLECPIEWGEAAKSFDFSSIGDVFRIEDLSEFSNEDIAGPIPSGSLSSLSSPGSSQNMAKHTVCASFLNEGDFICPPYEDGIGLEWLSDFVEDSFAATGSSNSGSLADLSKDKIDDNREKKKQNPTDEAIIPEIPPIKETPRSQRAVPGRARSKRRRSSGAPIRGWSTSEDYALQNEGGMKTVTGADAINHYQSSAPQQQPRRCTHCLSQRTPQWRLGPLGPKTLCNACGVRFKSGRLFPEYRPAKSPTFIRYIHSNSHKKVLEMRNEETNDLEGLVFDPHLSDSKHQDQGLLKVKIKLAGLDNLSSQSN

SEQ ID NO: 2411 - DNA, 1208 bp, Pinus radiata
gcttgtcttccccccagctgaggctctctgagaccaaggtgagattcagccagtagtaagctatagattgatagttcagagaaaagactgaaaggcaaaaactatatagacataacaacggagagagcagcacaggaaccaggttgcataatggctaggcctcaaagatacagaggagtccgtcagaggcactggggatcatgggtctctgaaatccgccatcccttattgaagaccagaatatggctaggaacatttgaaacagcagaggatgcagcacgagcatatgatgaagctgcaaggatgatgtgtgggccgagagctagaaccaacttcccattcaatcccaatgcacctccatctccatcttcaaaggttttgtcctccacgctcactgccaaactacaccgatgttatctggcctcgatacaaggaccgagatctggctcatcgaagaaggatgccatggcaagagctgataaaaataacaatatacatagcagcaatcagtccctcacttgcttaagattggataacgaaagatccaacaacattggtatttggcagaagaaagctgggtctaagcaatccgaatcaaattgggttatgaagttggagttggatcatgatcagcatggaaacagtacgctgaaacgggagacagatgatgatattgctcaaatgattgaggaattacttgactgtggatccttggagatctgctctcccatggcttctgctgattctagtatcagtagtgcagagtcgatgcttaattagcctttccagtgaatgttaagtctaatggccagcatgaaattttgcatgaatcctattagattctggatgtgcaggagaaattcttactcatgatctgcaaatttgctcagtcaaagacttgcaaggtgcaatttatgtgaggccatggaagttggaaggcttgatctatcagagaagttttataatctcaatcgtgatcttccacacctatattatagtaacctagcccgattttgttaaagggttgtagagatataggatatcatctctctgatctctttgtgcgctcctgggagacatttataatcaagtttctatataaatagccttttggcgtagtcttgtagctgttggcttcttttgttgaagcttgtggctaatatacttcacttaatgtatatctacaaaaattacagtcaaaaaaaaaa

SEQ ID NO: 2412 - protein, 209 aa, Pinus radiata
MARPQRYRGVRQRHWGSWVSEIRHPLLKTRIWLGTFETAEDAARAYDEAARMMCGPRARTNFPFNPNAPPSPSSKVLSSTLTAKLHRCYLASIQGPRSGSSKKDAMARADKNNNIHSSNQSLTCLRLDNERSNNIGIWQKKAGSKQSESNWVMKLELDHDQHGNSTLKRETDDDIAQMIEELLDCGSLEICSPMASADSSISSAESMLN

SEQ ID NO: 2413 - DNA, 1461 bp, Pinus radiata
gtggtcatcacgagttaccatatctgcccagacaattcccaggggtggtggcaggagttaccataagtgcccagataattcccagtgagttgatctcataaacagtttactagtgaagctaaaggctacggatcacatcagagatttggctagttaagagtgcctagtttagtagctttagggttagtgctctaacaattccgatattcctcgactgattgctgtttgtcttcagcgcagctgttttatggtttggatgaagaatctattaatctggatgcaaatgtcaaagctgtgactggtgtatagtttcgccctctctagtcttcatctggaaatgcagaccagcagggggcataatcgtccatgtatgtcgtctcacaatacagatcggccaaaacctagaaatttaaggatgacctcagagttggtagaaggatcacttgagtctgcctcttctcgaaattcttcaacacttttggattccccgagattatactggcaagatcagttcgttgatccttgttcaatgtggacccttgggtacagtagcgaccatacaacccttgagcagcccagcggagtaatagagaagagaggcaagctagtgcatggctgctacttcatgaaggaggagaagggtttgttcccggccagaatggagctgaactattctgggcctggatcaactgcatattccggcggcgcttcagaagagacctgccatggaaacacattttgcaggacagaaatttcatcattcacaggctcacagataccccagtgccagtccgagggttgtaaagcaaacttgagcagtgccaaacactaccatcgccgacataaagtttgcgaattccactctaaggctcctacggtcgttgttggcggtcagattcagcggttttgccaacagtgtagtagatttcatcagacatctgaatttgacggaggaaagcggagctgcagaaagcgccttgctgaccacaacagacgccggcggaaacctaaaccgagtcaatgtactacatcccaatgtcaggcagggacaacaaatttacaggatgacgacaagaaaactaaaggattatctggtcatgctgccgctggaattcagattataccaaacatgatctcaagcacaaatacgactctgcccttgattacctctgcaccattgttatcgtcagggacaatgatgatgttcccaaataattatagaggacagattcctgtgccacaaggaacatccaatgacaagacaagttgtgtagagtttctgcatgcaaatattccgcaaatggtctaagatttagcatctctatgactagcagctccaatcgtaaagaaaaaataaactttgtaaaacagttgggatattactgttatgtatctagaaccagaagttttgggcgatctttctgatataattgttatgtgcgatatatttataacttctta

SEQ ID NO: 2414 - protein, 323 aa, Pinus radiata
MQTSRGHNRPCMSSHNTDRPKPRNLRMTSELVEGSLESASSRNSSTLLDSPRLYWQDQFVDPCSMWTLGYSSDHTTLEQPSGVIEKRGKLVHGCYFMKEEKGLFPARMELNYSGPGSTAYSGGASEETCHGNTFCRTEISSFTGSQIPQCQSEGCKANLSSAKHYHRRHKVCEFHSKAPTVVVGGQIQRFCQQCSRFHQTSEFDGGKRSCRKRLADHNRRRRKPKPSQCTTSQCQAGTTNLQDDDKKTKGLSGHAAAGIQIIPNMISSTNTTLPLITSAPLLSSGTMMMFPNNYRGQIPVPQGTSNDKTSCVEFLHANIPQMV

SEQ ID NO: 2415 - DNA, 1716 bp, Pinus radiata
gtgaaaatgagctgcacaacaggaggactctcctctcccgtctccaaacccaagctaaggaaaggcctctggtcgcctgaggaggatgataaactcatcaactacatgatgaaaaacggccagggttgctggagcgatgtcgccaagcaagctggtctgcagagatgcggaaaaagctgtaggctgaggtggattaactatttaaggcccgacctcaaacgcggtgcattttcaccccaggaagaacaattgatcatacacttgcattccattctcggcaacaggtggtctcagattgcagcccgtttgcccggacgtacggacaacgagatcaagaatttctggaactcctgcataaagaagaagttgaaacacctttcggcctccaccaacaacagtaaatctatctctgcacctaatcgtaccagtaccatgaattcatcgatcacgcccttttctgaatcgtctgccgagccattggaggtcatggcaacaaggtatcagccatcgaatgcttttaatcatgaagtgcccactgcagaaaatcagttttgtattccggatgtattggcgttaagacatgagcaagtacagagtcagaatcaattttcaattgatcaggactcggccaccaacaacctcatttcccacctgtggaattccaattctacagctgtttcttctcatgagagcttctcccatgccttcatgtctccgggtctgcaaacgcaaggccatgttgtaaagactccaattaaaccatgcgatcaaatctcgtggagtacaccactgactcgtgaagctgctgggtctcatgcctgcaattactctcttggctgcaacatccctgctcttgttgagagcgagtcactgaaagaaaaattcaagaatgatgcaggcgatcagattaatgaaaatgagatcatgtattcttccacggcatcttctgtgataactgcatggagcactaattcctattcagatgccgaatattgtactgtcgatccacatgatcaggtgggaagtatcctggaagattacgtgagccatgagaagactacggatcatcagccatgcccaccacttaattcctctctgcaattcagtgcccctgaaattagatggactgctgatcagtctaacgatcatgaggaatatgactgcaaggatcgtctaaatttgagatatgatgtaaatttggggtaccctaataatactaacaacaaacagaacggttaccagctgcctcagatcggaggaggaggggttaatggcgatcactgggattgcacaagaattcccaacatggaagaagccaacagtacaacaccaacttctacgatactaggaggcagtgggcagtttgagtttgagtgtgatggtgatgcaggcggccaagtcacagcttgggctcatgacgctctgtataatgatatacatacagctgcttctgatctgctaggtcaaatctattttggctaaaatcgaaggcatcggttcagcaccaaatctttgctccataacccctggttttcaacgtcctttgtaatttgtaatttcagtgaatgttttttcaatgggattttagtttccgtgtacgtaaaagttatttgtaatttcatttttacccaaaatactatttgaattttgtaatagaataaaaattaagagcaagtggaccatccctccctttctctttaatgaataaaaaaaaaa

SEQ ID NO: 2416 - protein, 491 aa, Pinus radiata
MSCTTGGLSSPVSKPKLRKGLWSPEEDDKLINYMMKNGQGCWSDVAKQAGLQRCGKSCRLRWINYLRPDLKRGAFSPQEEQLIIHLHSILGNRWSQIAARLPGRTDNEIKNFWNSCIKKKLKHLSASTNNSKSISAPNRTSTMNSSITPFSESSAEPLEVMATRYQPSNAFNHEVPTAENQFCIPDVLALRHEQVQSQNQFSIDQDSATNNLISHLWNSNSTAVSSHESFSHAFMSPGLQTQGHVVKTPIKPCDQISWSTPLTREAAGSHACNYSLGCNIPALVESESLKEKFKNDAGDQINENEIMYSSTASSVITAWSTNSYSDAEYCTVDPHDQVGSILEDYVSHEKTTDHQPCPPLNSSLQFSAPEIRWTADQSNDHEEYDCKDRLNLRYDVNLGYPNNTNNKQNGYQLPQIGGGGVNGDHWDCTRIPNMEEANSTTPTSTILGGSGQFEFECDGDAGGQVTAWAHDALYNDIHTAASDLLGQIYFG

SEQ ID NO: 2417 - DNA, 1722 bp, Pinus radiata
atcggatagacccttgggaagattcgcttatggctgacacaagcccccggactgatgacacttctacggatgtcgatactgatgagaaaatgaatcagcagatggaccttgttcggcatgggggtgactcttctgatagaacaaaggacaaaaatggggatcagaagacacttcgcaggcttgctcagaatcgtgaggcagcaagaaaaagtcgtttgagaaaaaaagcatatgttcaacagctggaaagtagtcgattaaagctgactcagctggagcaggagcttcaacgtgcaaggcaacagggaattttcattggaggaagttgtgttggtggggatcaaagtcattcaatgagtggaaatggagccctagcatttgatatggagtatgctcgttggttggatgagcatcatcgacagataaatgaactgaggtcggcagtgaactcacatgtgggggacaatgagctgcgtgttctggttgaaggtgtcatgggacattacgatgaaatttttcgtctgaagactgtagcttcaaaagctgatgtctttcatctggtctctggcatgtggaagacgcctgcagaaagatgcttcatgtggatgggaggattccgtccttctgaacttctgaagatacttgtcactcatctggaaccattaacagagcaccagtttatgggcattaacaatttgcaacattcatcacaacaggcagaagatgccttatcacagggaatggatgccctgcaacaatctctagcagaaactcttgcttctgggtcccttggtccacctggcacttctggaaatgtagcgaactatatgggacaaatggcaatggcaatgggaaaattaggtacccttgaaggttttgttcaccaggctgacaatttgcggcaacagacactacagcaaatgcataggattttgacaactcgccaagcagcgcgtgcgcttcttgctatcagtgattacttttctcgtctacgtgcccttagctctctatggcttgcacgccccagagattaaatggttaggaatcacatgctttgatctgtaccacgttgcagccctaggcaatgggcatagccacatctatgagcaatcctgaaagagcttctccatctctgacaggatggagttgatgaggggttgtgagggtggatgtattgaagatgaaatacagaatacatgcttcgaaccatgcagaggtttggctttgccccttggtattttgaaataactcttgtacaatgattgaaatcttgttaaatcattgttgtgggaggaagtctgaaatcaccctttgagaatccagttgtgtccgggataattctcagcctttcatattgaagaaattaagctaactattcccttgacatccaagataggattttcaaagctgagtaggctttatttctttgaattagctagataggaatgtaaagtatttagaagtaattatccagtataatcacacaaggttggatctcagtgaacaagaaacttttttctgtggtttcaaatgtaacataataactaggtcgacagtttttggtctattagcataaatcatttgtttggctgcagtgatcaagtaatctttcgatctcttatgcagggaagccatacttcccttgtttgtgagatgtgagaaaaatctcgatccccccttgttcaatgatgaatacgacttgatattgagctaaaaaaaaaa

SEQ ID NO: 2418 - protein, 334 aa, Pinus radiata
MADTSPRTDDTSTDVDTDEKMNQQMDLVRHGGDSSDRTKDKNGDQKTLRRLAQNREAARKSRLRKKAYVQQLESSRLKLTQLEQELQRARQQGIFIGGSCVGGDQSHSMSGNGALAFDMEYARWLDEHHRQINELRSAVNSHVGDNELRVLVEGVMGHYDEIFRLKTVASKADVFHLVSGMWKTPAERCFMWMGGFRPSELLKILVTHLEPLTEHQFMGINNLQHSSQQAEDALSQGMDALQQSLAETLASGSLGPPGTSGNVANYMGQMAMAMGKLGTLEGFVHQADNLRQQTLQQMHRILTTRQAARALLAISDYFSRLRALSSLWLARPRD

SEQ ID NO: 2419 - DNA, 2933 bp, Pinus radiata
gatgatttatgccaactggaagctatactgtgctctctcagctaattttacgctagcttaaaggccttgatcaccattgcagagcttgcttttaacctctgatgtgggaggagggcggctctctttgtagagggagccgaggtcgctggctgcaggggttctaagaacaggtattataaggtgaatttggggaaatttgatggcagtgatggcaaacaataaggacgcgaaaaattcaatggacacgagcaagtatgttcgttatacgtctgagcaggtcgaagcgctggagcgtgtttacagcgagtgtccgaagccgagctcgcttcggcggcagcagcttattagagagtgccctatactttccaatattgagcccaagcaaatcaaagtttggtttcagaatcgaaggtgccgagagaagcagaggaaggaagcctcgaggcttcagactgttaacaggaagctgacggcaatgaacaagttgctcatggaggagaacgatcgccttcagaagcaagtttcacagttggtgtatgagaatggttacatgagacagcagctacagaatgcatctgtggccgccacagacacaagctgtgagtctgtggtgactagtggtcagcaccaacataatccaacacctcagcatcccccaagagatgctagccccgctggactcctgtctatagcagaggagaccttgacagagttcctttcaaaggctaaaggagctgctgtcgattgggtccagatgcctgggatgaagcctggtccggattcgattggtattgtagctatttcaaatacttgtaatggagtagctgcacgtgcttgcggtcttgtaggattagatcctacaaaggttgcagagatccttaaagatcgcccatcttggcttcgtgattgtcgttgccttgatgtcttgactgcgtttcctactggaaatggtggaacaatcgagcttttatacatgcagacatatgcggccactactttagcttctgctagagacttctggactctgagatacacaacagtgttggaagatggtagtcttgtggtttgtgaaaggtccttgagtggtactcagggtggtccaagcataccgccagtgcagcattttgtgagagcagaaatgcttcccagtggatatttgatacaaccttgcgaaggtggtggttccataatccgaattgttgatcacatggatctagagccatggagtgtgcctgaggttttacgaccactatatgaatcgtccactgtacttgcccagaaaatgacaattgcagcattgcgtcgattacgccaaattgcacaggaagccacaggtgaagtagtttttggttggggaagacagccagctgttctgcgaacatttagccagaggttaagcaggggtttcaacgaggccgtgaatggatttacagatgatgggtggtcattaatgggcagtgatggagtggaggatgtcactattgctatcaattcatctccaaacaaacattttgcctcccaagttaatgcttctaatgggctaacaactcttggtggtggcatcctttgtgcaaaggcatccatgctcttacagaatgtgcctccagcattacttgtacgtttcttgcgcgagcaccgatcagagtgggcagattccaacattgatgcctattctgcagctgctttaaaatcaagtccttatagtgttccaggatcaagagcagggggcttttcagggagtcaagtcatccttcccttagcacatactgtggaacatgaggagttcttagaggtcattaagctggaaggtcatggccttactcaggaggaagctgtcctgtccagagatatgtttctcttacagctttgcagcggaattgatgaaaatgcagctggagcatgtgctgaacttgtttttgcaccaattgatgaatcctttgctgatgatgctcctttgcttccttctgggttcagggttattcctttggaatcaagaacagatggatctgggggtcccaaccgcacattggacttggcttctgctctcgaggttggatcaactggaactagaacgtctggtgactctggcaccaactcgaatctgagatctgtgttgactattgcattccagtttacttacgagagccacttgcgagaaaatgtggcagctatggctcgtcaatatgtgcgtagtgttgtagcatctgtccagagggttgccatggcaatagccccttctcgactgaattcacatgttggcccaaggccacctcctgggactccagaagcacttactcttgcccgttggatttgtcagagctacagactccacataggggtggacctgtttcgagctgattgtgaagccagtgagtctgtactgaaactactttggcaccattcagatgcaatcatgtgctgttctgtgaagtcgttgcctgtttttacatttgcaaatcaagcagggttggacatgctggaaacgacattggttgcattgcaagatatatctttggacaaaattctggacgaaaatggtcgcaaaagttttttcacagattatggtcaaattattcaacagggttatgcttatctacctgctgggatatgtctctcaagtatgggcaggcctgcttcatatgaccgggcaatagcttggaaggttctgaatgacgaagacagtacccactgcatcgttttcatgtttatgaattggtcctttatgtgaccattctgttcatgcagaagagtatgtgaatactcatttttgtggaaattaagtagtcggctaaattatcacatattttattaagcttgtttggctaatactctcagaactcatatacctattagacaatttggatggattttgtaagcagcactttcttgttgcattttgttatatttaaagattctcagtgagaaaaaaaaaa

SEQ ID NO: 2420 - protein, 842 aa, Pinus radiata
MAVMANNKDAKNSMDTSKYVRYTSEQVEALERVYSECPKPSSLRRQQLIRECPILSNIEPKQIKVWFQNRRCREKQRKEASRLQTVNRKLTAMNKLLMEENDRLQKQVSQLVYENGYMRQQLQNASVAATDTSCESVVTSGQHQHNPTPQHPPRDASPAGLLSIAEETLTEFLSKAKGAAVDWVQMPGMKPGPDSIGIVAISNTCNGVAARACGLVGLDPTKVAEILKDRPSWLRDCRCLDVLTAFPTGNGGTIELLYMQTYAATTLASARDFWTLRYTTVLEDGSLVVCERSLSGTQGGPSIPPVQHFVRAEMLPSGYLIQPCEGGGSIIRIVDHMDLEPWSVPEVLRPLYESSTVLAQKMTIAALRRLRQIAQEATGEVVFGWGRQPAVLRTFSQRLSRGFNEAVNGFTDDGWSLMGSDGVEDVTIAINSSPNKHFASQVNASNGLTTLGGGILCAKASMLLQNVPPALLVRFLREHRSEWADSNIDAYSAAALKSSPYSVPGSRAGGFSGSQVILPLAHTVEHEEFLEVIKLEGHGLTQEEAVLSRDMFLLQLCSGIDENAAGACAELVFAPIDESFADDAPLLPSGFRVIPLESRTDGSGGPNRTLDLASALEVGSTGTRTSGDSGTNSNLRSVLTIAFQFTYESHLRENVAAMARQYVRSVVASVQRVAMAIAPSRLNSHVGPRPPPGTPEALTLARWICQSYRLHIGVDLFRADCEASESVLKLLWHHSDAIMCCSVKSLPVFTFANQAGLDMLETTLVALQDISLDKILDENGRKSFFTDYGQIIQQGYAYLPAGICLSSMGRPASYDRAIAWKVLNDEDSTHCIVFMFMNWSFM

SEQ ID NO: 2421 - DNA, 1717 bp, Pinus radiata
gtttatatgccatagtactcgtctatgttggcagataaaatctcacctggcctagttggagaaggaagacaattcagttttatatagccctgattgattctgcttagagtctgtgggttgagagaagaaattattttccttgggctgaagagatcaggctaattatggggcggacaccttgttgtgaaaaaaatattgggctgaagaaggggccatggacacctgaggaggatcaaaagctgatagattacatacaaagccatggccatggtagctggcgtgcccttcctaaacgagcagggctcttgagatgtggaaaaagttgcaggctgagatggaccaactatttaagacctgatataaaacgtggacagttttcatttgaggaagagcagactataattgaactccatgctgttcttggaaacaagtggtctactatagctgggcatctgcctgggaggactgacaatgaaataaaaaattactggaacacccatttgaagaaacgccttcttcagatgggaattgatcctgtgacacacaggccaagaacagacctcttggcttttcccaatatccaatcttcaatttttaatacacctggttttggtcatatggcccaatgggagagcgccagacttgaagcagaagctcggctgacaggagagtatttgagacaagccttattcatggcaggcaacggatcagccacagctgatctattcatgaggccgtgcaaatccgaatttggcaatgatcagtttaatttgacaaaaaatatgggcaacccaccatggatacagcagcctggaatggccttagactataagggtgccgtacctcagagtttggagcagtttttacagacaaatgtatgttctgcatcagacattaatgggggtggttgtttgagccatgaaggtggcttcagtattacgaggtttgcatctccatgttcaacgctggatggaattcaaatcaaaacagaacctcagagtctgtgtggtcctcaagtagtgaaaaatgatagtcagtttcttcatagtgaaggagatctacgaaaacaagccatgcttgatatgaatgtaggaagtaatgttctcagtaacatgaatgctgaatccaaggtttcatttggtcacaatggtattataactgaccaagaatacaataatttgggtcaaatagataataataaccatctttctcatgcagctactacactatggcctgttgaaggccagttgcaggccatagccagtgactccatgcctggattgatatcttccaccagctgcacttcaaacaacatttacagccagcctggtttaattcctcttctcaattccacaacctcttcaatgggtgatacaaattcttacagagaagcgcagccagaacagaaccaggatcaggcaagcaaacaatactggagcaccatgctcaaggctgctggaacaattcctgcctcccacatcatcagtgctcggcaatgagatatatccttttttctgcacaataaataatttctccattggcactatcctcttctgaattggtataaatattgtttgatttctctgttaaaaaaattctcatggtcatggtctggttgcaaaaatgttatatgcaatttcaatacgcgaagaagtcaatcaagatcagaagaactgaccaggtttttctcggacagatctgtaatttgtaataaact

SEQ ID NO: 2422 - protein, 444 aa, Pinus radiata
MGRTPCCEKNIGLKKGPWTPEEDQKLIDYIQSHGHGSWRALPKRAGLLRCGKSCRLRWTNYLRPDIKRGQFSFEEEQTIIELHAVLGNKWSTIAGHLPGRTDNEIKNYWNTHLKKRLLQMGIDPVTHRPRTDLLAFPNIQSSIFNTPGFGHMAQWESARLEAEARLTGEYLRQALFMAGNGSATADLFMRPCKSEFGNDQFNLTKNMGNPPWIQQPGMALDYKGAVPQSLEQFLQTNVCSASDINGGGCLSHEGGFSITRFASPCSTLDGIQIKTEPQSLCGPQVVKNDSQFLHSEGDLRKQAMLDMNVGSNVLSNMNAESKVSFGHNGIITDQEYNNLGQIDNNNHLSHAATTLWPVEGQLQAIASDSMPGLISSTSCTSNNIYSQPGLIPLLNSTTSSMGDTNSYREAQPEQNQDQASKQYWSTMLKAAGTIPASHIISARQ

SEQ ID NO: 2423 - DNA, 8959 bp, Artificial Sequence
  Plasmid pOX1
cgccggcgttgtggatacctcgcggaaaacttggccctcactgacagatgaggggcggacgttgacacttgaggggccgactcacccggcgcggcgttgacagatgaggggcaggctcgatttcggccggcgacgtggagctggccagcctcgcaaatcggcgaaaacgcctgattttacgcgagtttcccacagatgatgtggacaagcctggggataagtgccctgcggtattgacacttgaggggcgcgactactgacagatgaggggcgcgatccttgacacttgaggggcagagtgctgacagatgaggggcgcacctattgacatttgaggggctgtccacaggcagaaaatccagcatttgcaagggtttccgcccgtttttcggccaccgctaacctgtcttttaacctgcttttaaaccaatatttataaaccttgtttttaaccagggctgcgccctgtgcgcgtgaccgcgcacgccgaaggggggtgcccccccttctcgaaccctcccggcccgctaacgcgggcctcccatccccccaggggctgcgcccctcggccgcgaacggcctcaccccaaaaatggcagcgctggcagtccataattgtggtttcaaaatcggctccgtcgatactatgttatacgccaactttgaaaacaactttgaaaaagctgttttctggtatttaaggttttagaatgcaaggaacagtgaattggagttcgtcttgttataattagcttcttggggtatctttaaatactgtagaaaagaggaaggaaataataaatggctaaaatgagaatatcaccggaattgaaaaaactgatcgaaaaataccgctgcgtaaaagatacggaaggaatgtctcctgctaaggtatataagctggtgggagaaaatgaaaacctatatttaaaaatgacggacagccggtataaagggaccacctatgatgtggaacgggaaaaggacatgatgctatggctggaaggaaagctgcctgttccaaaggtcctgcactttgaacggcatgatggctggagcaatctgctcatgagtgaggccgatggcgtcctttgctcggaagagtatgaagatgaacaaagccctgaaaagattatcgagctgtatgcggagtgcatcaggctctttcactccatcgacatatcggattgtccctatacgaatagcttagacagccgcttagccgaattggattacttactgaataacgatctggccgatgtggattgcgaaaactgggaagaagacactccatttaaagatccgcgcgagctgtatgattttttaaagacggaaaagcccgaagaggaacttgtcttttcccacggcgacctgggagacagcaacatctttgtgaaagatggcaaagtaagtggctttattgatcttgggagaagcggcagggcggacaagtggtatgacattgccttctgcgtccggtcgatcagggaggatatcggggaagaacagtatgtcgagctattttttgacttactggggatcaagcctgattgggagaaaataaaatattatattttactggatgaattgttttagtacctagatgtggcgcaacgatgccggcgacaagcaggagcgcaccgacttcttccgcatcaagtgttttggctctcaggccgaggcccacggcaagtatttgggcaaggggtcgctggtattcgtgcagggcaagattcggaataccaagtacgagaaggacggccagacggtctacgggaccgacttcattgccgataaggtggattatctggacaccaaggcaccaggcgggtcaaatcaggaataagggcacattgccccggcgtgagtcggggcaatcccgcaaggagggtgaatgaatcggacgtttgaccggaaggcatacaggcaagaactgatcgacgcggggttttccgccgaggatgccgaaaccatcgcaagccgcaccgtcatgcgtgcgccccgcgaaaccttccagtccgtcggctcgatggtccagcaagctacggccaagatcgagcgcgacagcgtgcaactggctccccctgccctgcccgcgccatcggccgccgtggagcgttcgcgtcgtctcgaacaggaggcggcaggtttggcgaagtcgatgaccatcgacacgcgaggaactatgacgaccaagaagcgaaaaaccgccggcgaggacctggcaaaacaggtcagcgaggccaagcaggccgcgttgctgaaacacacgaagcagcagatcaaggaaatgcagctttccttgttcgatattgcgccgtggccggacacgatgcgagcgatgccaaacgacacggcccgctctgccctgttcaccacgcgcaacaagaaaatcccgcgcgaggcgctgcaaaacaaggtcattttccacgtcaacaaggacgtgaagatcacctacaccggcgtcgagctgcgggccgacgatgacgaactggtgtggcagcaggtgttggagtacgcgaagcgcacccctatcggcgagccgatcaccttcacgttctacgagctttgccaggacctgggctggtcgatcaatggccggtattacacgaaggccgaggaatgcctgtcgcgcctacaggcgacggcgatgggcttcacgtccgaccgcgttgggcacctggaatcggtgtcgctgctgcaccgcttccgcgtcctggaccgtggcaagaaaacgtcccgttgccaggtcctgatcgacgaggaaatcgtcgtgctgtttgctggcgaccactacacgaaattcatatgggagaagtaccgcaagctgtcgccgacggcccgacggatgttcgactatttcagctcgcaccgggagccgtacccgctcaagctggaaaccttccgcctcatgtgcggatcggattccacccgcgtgaagaagtggcgcgagcaggtcggcgaagcctgcgaagagttgcgaggcagcggcctggtggaacacgcctgggtcaatgatgacctggtgcattgcaaacgctagggccttgtggggtcagttccggctgggggttcagcagccagcgctttactggcatttcaggaacaagcgggcactgctcgacgcacttgcttcgctcagtatcgctcgggacgcacggcgcgctctacgaactgccgatagacaactgtcacggttaagcgagaaatgaataagaaggctgataattcggatctctgcgagggagatgatatttgatcacaggcagcaacgctctgtcatcgttacaatcaacatgctaccctccgcgagatcatccgtgtttcaaacccggcagcttagttgccgttcttccgaatagcatcggtaacatgagcaaagtctgccgccttacaacggctctcccgctgacgccgtcccggactgatgggctgcctgtatcgagtggtgattttgtgccgagctgccggtcggggagctgttggctggctggtggcaggatatattgtggtgtaaacaaattgacgcttagacaacttaataacacattgcggacgtttttaatgtactggggtggtttttcttttcaccagtgagacgggcaacagctgattgcccttcaccgcctggccctgagagagttgcagcaagcggtccacgctggtttgccccagcaggcgaaaatcctgtttgatggtggttccgaaatcggcaaaatcccttataaatcaaaagaatagcccgagatagggttgagtgttgttccagtttggaacaagagtccactattaaagaacgtggactccaacgtcaaagggcgaaaaaccgtctatcagggcgatggcccacggccgctctagaactagtggatcccccctacgtgcgatctagtaacatagatgacaccgcgcgcgataatttatcctagtttgcgcgctatattttgttttctatcgcgtattaaatgtataattgcgggactctaatcataaaaacccatctcataaataacgtcatgcattacatgttaattattacatgcttaacgtaattcaacagaaattatatgataatcatcgcaagaccggcaacaggattcaatcttaagaaactttattgccaaatgtttgaacgatccctcagaagaactcgtcaagaaggcgatagaaggcgatgcgctgcgaatcgggagcggcgataccgtaaagcacgaggaagcggtcagcccattcgccgccaagctcttcagcaatatcacgggtagccaacgctatgtcctgatagcggtccgccacacccagccggccacagtcgatgaatccagaaaagcggccattttccaccatgatattcggcaagcaggcatcgccatgggtcacgacgagatcctcgccgtcgggcatgcgcgccttgagcctggcgaacagttcggctggcgcgagcccctgatgctcttcgtccagatcatcctgatcgacaagaccggcttccatccgagtacgtgctcgctcgatgcgatgtttcgcttggtggtcgaatgggcaggtagccggatcaagcgtatgcagccgccgcattgcatcagccatgatggatactttctcggcaggagcaaggtgagatgacaggagatcctgccccggcacttcgcccaatagcagccagtcccttcccgcttcagtgacaacgtcgagcacagctgcgcaaggaacgcccgtcgtggccagccacgatagccgcgctgcctcgtcctggagttcattcagggcaccggacaggtcggtcttgacaaaaagaaccgggcgcccctgcgctgacagccggaacacggcggcatcagagcagccgattgtctgttgtgcccagtcatagccgaatagcctctccacccaagcggccggagaacctgcgtgcaatccatcttgttcaatcatctgttaatcagaaaaactcagattaatcgacaaattcgatcgcacaaactagaaactaacaccagatctagatagaaatcacaaatcgaagagtaattattcgacaaaactcaaattatttgaacaaatcggatgatatttatgaaaccctaatcgagaattaagatgatatctaacgatcaaacccagaaaatcgtcttcgatctaagattaacagaatctaaaccaaagaacatatacgaaattgggatcgaacgaaaacaaaatcgaagattttgagagaataaggaacacagaaatttaccttgatcacggtagagagaattgagagaaagtttttaagattttgagaaattgaaatctgaattgtgaagaagaagagctctttgggtattgttttatagaagaagaagaagaaaagacgaggacgactaggtcacgagaaagctaaggcggtgaagcaatagctaataataaaatgacacgtgtattgagcgttgtttacacgcaaagttgtttttggctaattgccttatttttaggttgaggaaaagtatttgtgctttgagttgataaacacgactcgtgtgtgccggctgcaaccactttgacgccgtttattactgactcgtcgacaaccacaatttctaacggtcgtcataagatccagccgttgagatttaacgatcgttacgatttatatttttttagcattatcgttttattttttaaatatacggtggagctgaaaattggcaataattgaaccgtgggtcccactgcattgaagcgtatttcgtattttctagaattcttcgtgctttatttcttttcctttttgtttttttttgccatttatctaatgcaagtgggcttataaaatcagtgaatttcttggaaaagtaacttctttatcgtataacatattgtgaaattatccatttcttttaattttttagtgttattggatatttttgtatgattattgatttgcataggataatgacttttgtatcaagttggtgaacaagtctcgttaaaaaaggcaagtggtttggtgactcgatttattcttgttatttaattcatatatcaatggatcttatttggggcctggtccatatttaacactcgtgttcagtccaatgaccaataatattttttcattaataacaatgtaacaagaatgatacacaaaacattctttgaataagttcgctatgaagaagggaacttatccggtcctagatcatcagttcatacaaacctccatagagttcaacatcttaaacaaggatatcctgatccgttgacggcgcgccaagcggccgcggccgggtggtgacatttattcataaattcatctcaaaacaagaaggatttacaaaaataaaagaaaacaaaattttcatctttaacataattataattgtgttcacaaaattcaaacttaaacccttaatataaagaatttctttcaacaatacactttaatcacaacttcttcaatcacaacctcctccaacaaaattaaaatagattaataaataaataaacttaactatttaaaaaaaaatattatacaaaatttattaaaacttcaaaataaacaaactttttatacaaaattcatcaaaactttaaaataaagctaaacactgaaaatgtgagtacatttaaaaggacgctgatcacaaaaattttgaaaacataaacaaacttgaaactctaccttttaagaatgagtttgtcgtctcattaactcattagttttatagttcgaatccaattaacgtatcttttattttatggaataagggtgttttaataagtgattttgggatttttttagtaatttatttgtgatatgttatggagtttttaaaaatatatatatatatatatatttttgggttgagtttacttaaaatttggaaaaggttggtaagaactataaattgagttgtgaatgagtgttttatggattttttaagatgttaaatttatatatgtaattaaaattttattttgaataacaaaaattataattggataaaaaattgttttgttaaatttagagtaaaaatttcaaaatctaaaataattaaacactattatttttaaaaaatttgttggtaaattttatcttatatttaagttaaaatttagaaaaaattaattttaaattaataaacttttgaagtcaaatattccaaatattttccaaaatattaaatctattttgcattcaaaatacaatttaaataataaaacttcatggaatagattaaccaatttgtataaaaaccaaaaatctcaaataaaatttaaattacaaaacattatcaacattatgatttcaagaaagacaataaccagtttccaataaaataaaaaacctcatggcccgtaattaagatctcattaattaattcttattttttaatttttttacatagaaaatatctttatattgtatccaagaaatatagaatgttctcgtccagggactattaatctccaaacaagtttcaaaatcattacattaaagctcatcatgtcatttgtggattggaaattatattgtataagagaaatatagaatgttctcgtctagggactattaatttccaaacaaatttcaaaatcattacattaaagctcatcatgtcatttgtggattggaaattagacaaaaaaaatcccaaatatttctctcaatctcccaaaatatagttcgaactccatatttttggaaattgagaatttttttacccaataatatatttttttatacattttagagattttccagacatatttgctctgggatttattggaatgaaggttgagttataaactttcagtaatccaagtatcttcggtttttgaagatactaaatccattatataataaaaacacattttaaacaccaatttaatgggatttcagatttgtatcccatgctattggctaaggcatttttcttattgtaatctaaccaattctaatttccacctggtgtgaactgactgacaaatgcggtccgaaaacagcgaatgaaatgtctgggtgatcggtcaaacaagcggtgggcgagagagcgcgggtgttggcctagccgggatgggggtaggtagacggcgtattaccggcgagttgtccgaatggagttttcggggtaggtagtaacgtagacgtcaatggaaaaagtcataatctccgtcaaaaatccaaccgctccttcacatcgcagagttggtggccacgggaccctccacccactcactcgatcgcctgccgtggttgcccattattcaaccatacgccacttgactcttcaccaacaattccaggccggctttctatacaatgtactgcacaggaaaatccaatataaaaagccggcctctgcttccttctcagtagcccccagctcattcaattcttcccactgcaggctacatttgtcagacacgttttccgccatttttcgcctgtttctgcggagaatttgatcaggttcggattgggattgaatcaattgaaaggtttttattttcagtatttcgatcgccggatcccccgggctgcaggaattcgtccagcagttgtctggagctccaccagaaatctggaagctctacaattggctagcaaagtacttaaagcttgcactaccatgctataacagatactacttatgtatttcttatgctttgtgtgattttgtctctgtcttgtcctcgttaaatttgcttgcatgttgcctttaagcattgttagctaaattatgttgtttctgtgagttcaaatctttgaacaaaatttagggcttacaaaccatgcggccgcggtaccttaattaaaagtttaaactatcagtgtttgacaggatatattggcgggtaaacctaagagaaaagagcgtttattagaataatcggatatttaaaagggcgtgaaaaggtttatccgttcgtccatttgtatgtgcatgccaaccacagggttccccagatc

SEQ ID NO: 2424 - DNA, 7851 bp, Artificial Sequence
  Plasmid pOX28
cgccggcgttgtggatacctcgcggaaaacttggccctcactgacagatgaggggcggacgttgacacttgaggggccgactcacccggcgcggcgttgacagatgaggggcaggctcgatttcggccggcgacgtggagctggccagcctcgcaaatcggcgaaaacgcctgattttacgcgagtttcccacagatgatgtggacaagcctggggataagtgccctgcggtattgacacttgaggggcgcgactactgacagatgaggggcgcgatccttgacacttgaggggcagagtgctgacagatgaggggcgcacctattgacatttgaggggctgtccacaggcagaaaatccagcatttgcaagggtttccgcccgtttttcggccaccgctaacctgtcttttaacctgcttttaaaccaatatttataaaccttgtttttaaccagggctgcgccctgtgcgcgtgaccgcgcacgccgaaggggggtgcccccccttctcgaaccctcccggcccgctaacgcgggcctcccatccccccaggggctgcgcccctcggccgcgaacggcctcaccccaaaaatggcagcgctggcagtccataattgtggtttcaaaatcggctccgtcgatactatgttatacgccaactttgaaaacaactttgaaaaagctgttttctggtatttaaggttttagaatgcaaggaacagtgaattggagttcgtcttgttataattagcttcttggggtatctttaaatactgtagaaaagaggaaggaaataataaatggctaaaatgagaatatcaccggaattgaaaaaactgatcgaaaaataccgctgcgtaaaagatacggaaggaatgtctcctgctaaggtatataagctggtgggagaaaatgaaaacctatatttaaaaatgacggacagccggtataaagggaccacctatgatgtggaacgggaaaaggacatgatgctatggctggaaggaaagctgcctgttccaaaggtcctgcactttgaacggcatgatggctggagcaatctgctcatgagtgaggccgatggcgtcctttgctcggaagagtatgaagatgaacaaagccctgaaaagattatcgagctgtatgcggagtgcatcaggctctttcactccatcgacatatcggattgtccctatacgaatagcttagacagccgcttagccgaattggattacttactgaataacgatctggccgatgtggattgcgaaaactgggaagaagacactccatttaaagatccgcgcgagctgtatgattttttaaagacggaaaagcccgaagaggaacttgtcttttcccacggcgacctgggagacagcaacatctttgtgaaagatggcaaagtaagtggctttattgatcttgggagaagcggcagggcggacaagtggtatgacattgccttctgcgtccggtcgatcagggaggatatcggggaagaacagtatgtcgagctattttttgacttactggggatcaagcctgattgggagaaaataaaatattatattttactggatgaattgttttagtacctagatgtggcgcaacgatgccggcgacaagcaggagcgcaccgacttcttccgcatcaagtgttttggctctcaggccgaggcccacggcaagtatttgggcaaggggtcgctggtattcgtgcagggcaagattcggaataccaagtacgagaaggacggccagacggtctacgggaccgacttcattgccgataaggtggattatctggacaccaaggcaccaggcgggtcaaatcaggaataagggcacattgccccggcgtgagtcggggcaatcccgcaaggagggtgaatgaatcggacgtttgaccggaaggcatacaggcaagaactgatcgacgcggggttttccgccgaggatgccgaaaccatcgcaagccgcaccgtcatgcgtgcgccccgcgaaaccttccagtccgtcggctcgatggtccagcaagctacggccaagatcgagcgcgacagcgtgcaactggctccccctgccctgcccgcgccatcggccgccgtggagcgttcgcgtcgtctcgaacaggaggcggcaggtttggcgaagtcgatgaccatcgacacgcgaggaactatgacgaccaagaagcgaaaaaccgccggcgaggacctggcaaaacaggtcagcgaggccaagcaggccgcgttgctgaaacacacgaagcagcagatcaaggaaatgcagctttccttgttcgatattgcgccgtggccggacacgatgcgagcgatgccaaacgacacggcccgctctgccctgttcaccacgcgcaacaagaaaatcccgcgcgaggcgctgcaaaacaaggtcattttccacgtcaacaaggacgtgaagatcacctacaccggcgtcgagctgcgggccgacgatgacgaactggtgtggcagcaggtgttggagtacgcgaagcgcacccctatcggcgagccgatcaccttcacgttctacgagctttgccaggacctgggctggtcgatcaatggccggtattacacgaaggccgaggaatgcctgtcgcgcctacaggcgacggcgatgggcttcacgtccgaccgcgttgggcacctggaatcggtgtcgctgctgcaccgcttccgcgtcctggaccgtggcaagaaaacgtcccgttgccaggtcctgatcgacgaggaaatcgtcgtgctgtttgctggcgaccactacacgaaattcatatgggagaagtaccgcaagctgtcgccgacggcccgacggatgttcgactatttcagctcgcaccgggagccgtacccgctcaagctggaaaccttccgcctcatgtgcggatcggattccacccgcgtgaagaagtggcgcgagcaggtcggcgaagcctgcgaagagttgcgaggcagcggcctggtggaacacgcctgggtcaatgatgacctggtgcattgcaaacgctagggccttgtggggtcagttccggctgggggttcagcagccagcgctttactggcatttcaggaacaagcgggcactgctcgacgcacttgcttcgctcagtatcgctcgggacgcacggcgcgctctacgaactgccgatagacaactgtcacggttaagcgagaaatgaataagaaggctgataattcggatctctgcgagggagatgatatttgatcacaggcagcaacgctctgtcatcgttacaatcaacatgctaccctccgcgagatcatccgtgtttcaaacccggcagcttagttgccgttcttccgaatagcatcggtaacatgagcaaagtctgccgccttacaacggctctcccgctgacgccgtcccggactgatgggctgcctgtatcgagtggtgattttgtgccgagctgccggtcggggagctgttggctggctggtggcaggatatattgtggtgtaaacaaattgacgcttagacaacttaataacacattgcggacgtttttaatgtactggggtggtttttcttttcaccagtgagacgggcaacagctgattgcccttcaccgcctggccctgagagagttgcagcaagcggtccacgctggtttgccccagcaggcgaaaatcctgtttgatggtggttccgaaatcggcaaaatcccttataaatcaaaagaatagcccgagatagggttgagtgttgttccagtttggaacaagagtccactattaaagaacgtggactccaacgtcaaagggcgaaaaaccgtctatcagggcgatggcccacggccgctctagaactagtggatcccccctacgtgcgatctagtaacatagatgacaccgcgcgcgataatttatcctagtttgcgcgctatattttgttttctatcgcgtattaaatgtataattgcgggactctaatcataaaaacccatctcataaataacgtcatgcattacatgttaattattacatgcttaacgtaattcaacagaaattatatgataatcatcgcaagaccggcaacaggattcaatcttaagaaactttattgccaaatgtttgaacgatccctcagaagaactcgtcaagaaggcgatagaaggcgatgcgctgcgaatcgggagcggcgataccgtaaagcacgaggaagcggtcagcccattcgccgccaagctcttcagcaatatcacgggtagccaacgctatgtcctgatagcggtccgccacacccagccggccacagtcgatgaatccagaaaagcggccattttccaccatgatattcggcaagcaggcatcgccatgggtcacgacgagatcctcgccgtcgggcatgcgcgccttgagcctggcgaacagttcggctggcgcgagcccctgatgctcttcgtccagatcatcctgatcgacaagaccggcttccatccgagtacgtgctcgctcgatgcgatgtttcgcttggtggtcgaatgggcaggtagccggatcaagcgtatgcagccgccgcattgcatcagccatgatggatactttctcggcaggagcaaggtgagatgacaggagatcctgccccggcacttcgcccaatagcagccagtcccttcccgcttcagtgacaacgtcgagcacagctgcgcaaggaacgcccgtcgtggccagccacgatagccgcgctgcctcgtcctggagttcattcagggcaccggacaggtcggtcttgacaaaaagaaccgggcgcccctgcgctgacagccggaacacggcggcatcagagcagccgattgtctgttgtgcccagtcatagccgaatagcctctccacccaagcggccggagaacctgcgtgcaatccatcttgttcaatcatctgttaatcagaaaaactcagattaatcgacaaattcgatcgcacaaactagaaactaacaccagatctagatagaaatcacaaatcgaagagtaattattcgacaaaactcaaattatttgaacaaatcggatgatatttatgaaaccctaatcgagaattaagatgatatctaacgatcaaacccagaaaatcgtcttcgatctaagattaacagaatctaaaccaaagaacatatacgaaattgggatcgaacgaaaacaaaatcgaagattttgagagaataaggaacacagaaatttaccttgatcacggtagagagaattgagagaaagtttttaagattttgagaaattgaaatctgaattgtgaagaagaagagctctttgggtattgttttatagaagaagaagaagaaaagacgaggacgactaggtcacgagaaagctaaggcggtgaagcaatagctaataataaaatgacacgtgtattgagcgttgtttacacgcaaagttgtttttggctaattgccttatttttaggttgaggaaaagtatttgtgctttgagttgataaacacgactcgtgtgtgccggctgcaaccactttgacgccgtttattactgactcgtcgacaaccacaatttctaacggtcgtcataagatccagccgttgagatttaacgatcgttacgatttatatttttttagcattatcgttttattttttaaatatacggtggagctgaaaattggcaataattgaaccgtgggtcccactgcattgaagcgtatttcgtattttctagaattcttcgtgctttatttcttttcctttttgtttttttttgccatttatctaatgcaagtgggcttataaaatcagtgaatttcttggaaaagtaacttctttatcgtataacatattgtgaaattatccatttcttttaattttttagtgttattggatatttttgtatgattattgatttgcataggataatgacttttgtatcaagttggtgaacaagtctcgttaaaaaaggcaagtggtttggtgactcgatttattcttgttatttaattcatatatcaatggatcttatttggggcctggtccatatttaacactcgtgttcagtccaatgaccaataatattttttcattaataacaatgtaacaagaatgatacacaaaacattctttgaataagttcgctatgaagaagggaacttatccggtcctagatcatcagttcatacaaacctccatagagttcaacatcttaaacaaggatatcctgatccgttgacggcgcgccaagcggccgcaaaacccctcacaaatacataaaaaaaattctttatttaattatcaaactctccactacctttcccaccaaccgttacaatcctgaatgttggaaaaaactaactacattgatataaaaaaactacattacttcctaaatcatatcaaaattgtataaatatatccactcaaaggagtctagaagatccacttggacaaattgcccatagttggaaagatgttcaccaagtcaacaagatttatcaatggaaaaatccatctaccaaacttactttcaagaaaatccaaggattatagagtaaaaaatctatgtattattaagtcaaaaagaaaaccaaagtgaacaaatattgatgtacaagtttgagaggataagacattggaatcgtctaaccaggaggcggaggaattccctagacagttaaaagtggccggaatcccggtaaaaaagattaaaatttttttgtagagggagtgcttgaatcatgttttttatgatggaaatagattcagcaccatcaaaaacattcaggacacctaaaattttgaagtttaacaaaaataacttggatctacaaaaatccgtatcggattttctctaaatataactagaattttcataactttcaaagcaactcctcccctaaccgtaaaacttttcctacttcaccgttaattacattccttaagagtagataaagaaataaagtaaataaaagtattcacaaaccaacaatttatttcttttatttacttaaaaaaacaaaaagtttatttattttacttaaatggcataatgacatatcggagatccctcgaacgagaatcttttatctccctggttttgtattaaaaagtaatttattgtggggtccacgcggagttggaatcctacagacgcgctttacatacgtctcgagaagcgtgacggatgtgcgaccggatgaccctgtataacccaccgacacagccagcgcacagtatacacgtgtcatttctctattggaaaatgtcgttgttatccccgctggtacgcaaccaccgatggtgacaggtcgtctgttgtcgtgtcgcgtagcgggagaagggtctcatccaacgctattaaatactcgccttcaccgcgttacttctcatcttttctcttgcgttgtataatcagtgcgatattctcagagagcttttcattcaacccgggctgcagaacaattggctagcaaagtacttaaagcttgcactaccatgctataacagatactacttatgtatttcttatgctttgtgtgattttgtctctgtcttgtcctcgttaaatttgcttgcatgttgcctttaagcattgttagctaaattatgttgtttctgtgagttcaaatctttgaacaaaatttagggcttacaaaccatgcggccgcggtaccttaattaaaagtttaaactatcagtgtttgacaggatatattggcgggtaaacctaagagaaaagagcgtttattagaataatcggatatttaaaagggcgtgaaaaggtttatccgttcgtccatttgtatgtgcatgccaaccacagggttccccagatc

SEQ ID NO: 2425 - DNA, 9435 bp, Artificial Sequence
  Plasmid pAGSM49
cgccggcgttgtggatacctcgcggaaaacttggccctcactgacagatgaggggcggacgttgacacttgaggggccgactcacccggcgcggcgttgacagatgaggggcaggctcgatttcggccggcgacgtggagctggccagcctcgcaaatcggcgaaaacgcctgattttacgcgagtttcccacagatgatgtggacaagcctggggataagtgccctgcggtattgacacttgaggggcgcgactactgacagatgaggggcgcgatccttgacacttgaggggcagagtgctgacagatgaggggcgcacctattgacatttgaggggctgtccacaggcagaaaatccagcatttgcaagggtttccgcccgtttttcggccaccgctaacctgtcttttaacctgcttttaaaccaatatttataaaccttgtttttaaccagggctgcgccctgtgcgcgtgaccgcgcacgccgaaggggggtgcccccccttctcgaaccctcccggcccgctaacgcgggcctcccatccccccaggggctgcgcccctcggccgcgaacggcctcaccccaaaaatggcagcgctggcagtccataattgtggtccaatttgcagccgtccgagacaggaggacatcgtccagctgaaaccggggcagaatccggccatttctgaagagaaaaatggtaaactgatagaataaaatcataagaaaggagccgcacatgaaaaaagcagtcattaacggggaacaaatcagaagtatcagcgacctccaccagacattgaaaaaggagcttgcccttccggaatactacggtgaaaacctggacgctttatgggattgtctgaccggatgggtggagtacccgctcgttttggaatggaggcagtttgaacaaagcaagcagctgactgaaaatggcgccgagagtgtgcttcaggttttccgtgaagcgaaagcggaaggctgcgacatcaccatcatactttcttaatacgatcaatgggagaggaacaatatggaaacacaaaccacaattgtggtttcaaaatcggctccgtcgatactatgttatacgccaactttgaaaacaactttgaaaaagctgttttctggtatttaaggttttagaatgcaaggaacagtgaattggagttcgtcttgttataattagcttcttggggtatctttaaatactgtagaaaagaggaaggaaataataaatggctaaaatgagaatatcaccggaattgaaaaaactgatcgaaaaataccgctgcgtaaaagatacggaaggaatgtctcctgctaaggtatataagctggtgggagaaaatgaaaacctatatttaaaaatgacggacagccggtataaagggaccacctatgatgtggaacgggaaaaggacatgatgctatggctggaaggaaagctgcctgttccaaaggtcctgcactttgaacggcatgatggctggagcaatctgctcatgagtgaggccgatggcgtcctttgctcggaagagtatgaagatgaacaaagccctgaaaagattatcgagctgtatgcggagtgcatcaggctctttcactccatcgacatatcggattgtccctatacgaatagcttagacagccgcttagccgaattggattacttactgaataacgatctggccgatgtggattgcgaaaactgggaagaagacactccatttaaagatccgcgcgagctgtatgattttttaaagacggaaaagcccgaagaggaacttgtcttttcccacggcgacctgggagacagcaacatctttgtgaaagatggcaaagtaagtggctttattgatcttgggagaagcggcagggcggacaagtggtatgacattgccttctgcgtccggtcgatcagggaggatatcggggaagaacagtatgtcgagctattttttgacttactggggatcaagcctgattgggagaaaataaaatattatattttactggatgaattgttttagtacctagatgtggcgcaacgatgccggcgacaagcaggagcgcaccgacttcttccgcatcaagtgttttggctctcaggccgaggcccacggcaagtatttgggcaaggggtcgctggtattcgtgcagggcaagattcggaataccaagtacgagaaggacggccagacggtctacgggaccgacttcattgccgataaggtggattatctggacaccaaggcaccaggcgggtcaaatcaggaataagggcacattgccccggcgtgagtcggggcaatcccgcaaggagggtgaatgaatcggacgtttgaccggaaggcatacaggcaagaactgatcgacgcggggttttccgccgaggatgccgaaaccatcgcaagccgcaccgtcatgcgtgcgccccgcgaaaccttccagtccgtcggctcgatggtccagcaagctacggccaagatcgagcgcgacagcgtgcaactggctccccctgccctgcccgcgccatcggccgccgtggagcgttcgcgtcgtctcgaacaggaggcggcaggtttggcgaagtcgatgaccatcgacacgcgaggaactatgacgaccaagaagcgaaaaaccgccggcgaggacctggcaaaacaggtcagcgaggccaagcaggccgcgttgctgaaacacacgaagcagcagatcaaggaaatgcagctttccttgttcgatattgcgccgtggccggacacgatgcgagcgatgccaaacgacacggcccgctctgccctgttcaccacgcgcaacaagaaaatcccgcgcgaggcgctgcaaaacaaggtcattttccacgtcaacaaggacgtgaagatcacctacaccggcgtcgagctgcgggccgacgatgacgaactggtgtggcagcaggtgttggagtacgcgaagcgcacccctatcggcgagccgatcaccttcacgttctacgagctttgccaggacctgggctggtcgatcaatggccggtattacacgaaggccgaggaatgcctgtcgcgcctacaggcgacggcgatgggcttcacgtccgaccgcgttgggcacctggaatcggtgtcgctgctgcaccgcttccgcgtcctggaccgtggcaagaaaacgtcccgttgccaggtcctgatcgacgaggaaatcgtcgtgctgtttgctggcgaccactacacgaaattcatatgggagaagtaccgcaagctgtcgccgacggcccgacggatgttcgactatttcagctcgcaccgggagccgtacccgctcaagctggaaaccttccgcctcatgtgcggatcggattccacccgcgtgaagaagtggcgcgagcaggtcggcgaagcctgcgaagagttgcgaggcagcggcctggtggaacacgcctgggtcaatgatgacctggtgcattgcaaacgctagggccttgtggggtcagttccggctgggggttcagcagccagcgctttactggcatttcaggaacaagcgggcactgctcgacgcacttgcttcgctcagtatcgctcgggacgcacggcgcgctctacgaactgccgatagacaactgtcacggttaagcgagaaatgaataagaaggctgataattcggatctctgcgagggagatgatatttgatcacaggcagcaacgctctgtcatcgttacaatcaacatgctaccctccgcgagatcatccgtgtttcaaacccggcagcttagttgccgttcttccgaatagcatcggtaacatgagcaaagtctgccgccttacaacggctctcccgctgacgccgtcccggactgatgggctgcctgtatcgagtggtgattttgtgccgagctgccggtcggggagctgttggctggctggtggcaggatatattgtggtgtaaacaaattgacgcttagacaacttaataacacattgcggacgtttttaatgtactggggtggtttttcttttcaccagtgagacgggcaacagctgattgcccttcaccgcctggccctgagagagttgcagcaagcggtccacgctggtttgccccagcaggcgaaaatcctgtttgatggtggttccgaaatcggcaaaatcccttataaatcaaaagaatagcccgagatagggttgagtgttgttccagtttggaacaagagtccactattaaagaacgtggactccaacgtcaaagggcgaaaaaccgtctatcagggcgatggcccacggccgctctagaactagtggatcccccctacgtgcgatctagtaacatagatgacaccgcgcgcgataatttatcctagtttgcgcgctatattttgttttctatcgcgtattaaatgtataattgcgggactctaatcataaaaacccatctcataaataacgtcatgcattacatgttaattattacatgcttaacgtaattcaacagaaattatatgataatcatcgcaagaccggcaacaggattcaatcttaagaaactttattgccaaatgtttgaacgatccctcagaagaactcgtcaagaaggcgatagaaggcgatgcgctgcgaatcgggagcggcgataccgtaaagcacgaggaagcggtcagcccattcgccgccaagctcttcagcaatatcacgggtagccaacgctatgtcctgatagcggtccgccacacccagccggccacagtcgatgaatccagaaaagcggccattttccaccatgatattcggcaagcaggcatcgccatgggtcacgacgagatcctcgccgtcgggcatgcgcgccttgagcctggcgaacagttcggctggcgcgagcccctgatgctcttcgtccagatcatcctgatcgacaagaccggcttccatccgagtacgtgctcgctcgatgcgatgtttcgcttggtggtcgaatgggcaggtagccggatcaagcgtatgcagccgccgcattgcatcagccatgatggatactttctcggcaggagcaaggtgagatgacaggagatcctgccccggcacttcgcccaatagcagccagtcccttcccgcttcagtgacaacgtcgagcacagctgcgcaaggaacgcccgtcgtggccagccacgatagccgcgctgcctcgtcctggagttcattcagggcaccggacaggtcggtcttgacaaaaagaaccgggcgcccctgcgctgacagccggaacacggcggcatcagagcagccgattgtctgttgtgcccagtcatagccgaatagcctctccacccaagcggccggagaacctgcgtgcaatccatcttgttcaatcatctgttaatcagaaaaactcagattaatcgacaaattcgatcgcacaaactagaaactaacaccagatctagatagaaatcacaaatcgaagagtaattattcgacaaaactcaaattatttgaacaaatcggatgatatttatgaaaccctaatcgagaattaagatgatatctaacgatcaaacccagaaaatcgtcttcgatctaagattaacagaatctaaaccaaagaacatatacgaaattgggatcgaacgaaaacaaaatcgaagattttgagagaataaggaacacagaaatttaccttgatcacggtagagagaattgagagaaagtttttaagattttgagaaattgaaatctgaattgtgaagaagaagagctctttgggtattgttttatagaagaagaagaagaaaagacgaggacgactaggtcacgagaaagctaaggcggtgaagcaatagctaataataaaatgacacgtgtattgagcgttgtttacacgcaaagttgtttttggctaattgccttatttttaggttgaggaaaagtatttgtgctttgagttgataaacacgactcgtgtgtgccggctgcaaccactttgacgccgtttattactgactcgtcgacaaccacaatttctaacggtcgtcataagatccagccgttgagatttaacgatcgttacgatttatatttttttagcattatcgttttattttttaaatatacggtggagctgaaaattggcaataattgaaccgtgggtcccactgcattgaagcgtatttcgtattttctagaattcttcgtgctttatttcttttcctttttgtttttttttgccatttatctaatgcaagtgggcttataaaatcagtgaatttcttggaaaagtaacttctttatcgtataacatattgtgaaattatccatttcttttaattttttagtgttattggatatttttgtatgattattgatttgcataggataatgacttttgtatcaagttggtgaacaagtctcgttaaaaaaggcaagtggtttggtgactcgatttattcttgttatttaattcatatatcaatggatcttatttggggcctggtccatatttaacactcgtgttcagtccaatgaccaataatattttttcattaataacaatgtaacaagaatgatacacaaaacattctttgaataagttcgctatgaagaagggaacttatccggtcctagatcatcagttcatacaaacctccatagagttcaacatcttaaacaaggatatcctgatccgttgacggcgcgccaagcggccgcatttaaatgggccctatctaatcgaattttgtaaactggtttgataagccatcaatgcatcagtcaagaatgaatcattgcaactaagttgatataattcaatttaccatagaactcaaatgttgatatcttcttatggattttctgatcttctacattattagaaagaaacttgatttaccagtaatgatgatacatatccaatagaacgaaataagccaatctttataggttttggtagtaaagttacaacatcagagacatgtatgtattgtctctcagaagagctcttgaccgatcagagtttgaagaaaaatttattacacactttatgtaaagctgaaaaaaacggcctcccgcagggaagccgtttttttcgttatctgatttttgtaaaggtctgatactcgtccgttgttttgtaaatcagccagtcgcttgagtaaagaatccggtctgaatttctgaagcctgatgtatagttaatatccgcttcacgccatgttcgtccgcttttgcccgggagtttgccttccctgtttgagaagatgtctccgccgatgcttttccccggagcgacgtctgcaaggttcccttttgatgccacccagccgagggcttgtgcttctgattttgtaatgtaattatcaggtagcttatgatatgtctgaagataatccgcaaccccgtcaaacgtgttgataacctgtgccataaatcttctaaaaacagcagaactgactattcaaagaaagtagaacccacagaaagtaatcaaagtagtttgattaaatgcgttgtgtatcatcgcagcccctgctacggatatttataggaaaggtttgagagcaatgtgtgcagcaagttgtgtgtgaatcacctgcttccatggcggaggataaataatttagtcacgcatttagttgaacgtaactactaactcctctaccgctaatcattcttcttttgcccgggcaagttcaacaacaaccccacaatcacgcttcctgtattttgttttgttttcaaaacaatagaattcactttttactgccaaaattatgttttactcgagagcccgggctcctgcaattgaagcttctgttatcctgatccgttgacggcgcgccaagcggccgcaaaacccctcacaaatacataaaaaaaattctttatttaattatcaaactctccactacctttcccaccaaccgttacaatcctgaatgttggaaaaaactaactacattgatataaaaaaactacattacttcctaaatcatatcaaaattgtataaatatatccactcaaaggagtctagaagatccacttggacaaattgcccatagttggaaagatgttcaccaagtcaacaagatttatcaatggaaaaatccatctaccaaacttactttcaagaaaatccaaggattatagagtaaaaaatctatgtattattaagtcaaaaagaaaaccaaagtgaacaaatattgatgtacaagtttgagaggataagacattggaatcgtctaaccaggaggcggaggaattccctagacagttaaaagtggccggaatcccggtaaaaaagattaaaatttttttgtagagggagtgcttgaatcatgttttttatgatggaaatagattcagcaccatcaaaaacattcaggacacctaaaattttgaagtttaacaaaaataacttggatctacaaaaatccgtatcggattttctctaaatataactagaattttcataactttcaaagcaactcctcccctaaccgtaaaacttttcctacttcaccgttaattacattccttaagagtagataaagaaataaagtaaataaaagtattcacaaaccaacaatttatttcttttatttacttaaaaaaacaaaaagtttatttattttacttaaatggcataatgacatatcggagatccctcgaacgagaatcttttatctccctggttttgtattaaaaagtaatttattgtggggtccacgcggagttggaatcctacagacgcgctttacatacgtctcgagaagcgtgacggatgtgcgaccggatgaccctgtataacccaccgacacagccagcgcacagtatacacgtgtcatttctctattggaaaatgtcgttgttatccccgctggtacgcaaccaccgatggtgacaggtcgtctgttgtcgtgtcgcgtagcgggagaagggtctcatccaacgctattaaatactcgccttcaccgcgttacttctcatcttttctcttgcgttgtataatcagtgcgatattctcagagagcttttcattcaacccgggctgcagaacaattggctagcaaagtacttaaagcttgcactaccatgctataacagatactacttatgtatttcttatgctttgtgtgattttgtctctgtcttgtcctcgttaaatttgcttgcatgttgcctttaagcattgttagctaaattatgttgtttctgtgagttcaaatctttgaacaaaatttagggcttacaaaccatgcggccgcggtaccttaattaaaagtttaaactatcagtgtttgacaggatatattggcgggtaaacctaagagaaaagagcgtttattagaataatcggatatttaaaagggcgtgaaaaggtttatccgttcgtccatttgtatgtgcatgccaaccacagggttccccagatc

SEQ ID NO: 2426 - DNA, 10122 bp, Artificial Sequence
  Plasmid pGrowth58
cgccggcgttgtggatacctcgcggaaaacttggccctcactgacagatgaggggcggacgttgacacttgaggggccgactcacccggcgcggcgttgacagatgaggggcaggctcgatttcggccggcgacgtggagctggccagcctcgcaaatcggcgaaaacgcctgattttacgcgagtttcccacagatgatgtggacaagcctggggataagtgccctgcggtattgacacttgaggggcgcgactactgacagatgaggggcgcgatccttgacacttgaggggcagagtgctgacagatgaggggcgcacctattgacatttgaggggctgtccacaggcagaaaatccagcatttgcaagggtttccgcccgtttttcggccaccgctaacctgtcttttaacctgcttttaaaccaatatttataaaccttgtttttaaccagggctgcgccctgtgcgcgtgaccgcgcacgccgaaggggggtgcccccccttctcgaaccctcccggcccgctaacgcgggcctcccatccccccaggggctgcgcccctcggccgcgaacggcctcaccccaaaaatggcagcgctggcagtccataattgtggtttcaaaatcggctccgtcgatactatgttatacgccaactttgaaaacaactttgaaaaagctgttttctggtatttaaggttttagaatgcaaggaacagtgaattggagttcgtcttgttataattagcttcttggggtatctttaaatactgtagaaaagaggaaggaaataataaatggctaaaatgagaatatcaccggaattgaaaaaactgatcgaaaaataccgctgcgtaaaagatacggaaggaatgtctcctgctaaggtatataagctggtgggagaaaatgaaaacctatatttaaaaatgacggacagccggtataaagggaccacctatgatgtggaacgggaaaaggacatgatgctatggctggaaggaaagctgcctgttccaaaggtcctgcactttgaacggcatgatggctggagcaatctgctcatgagtgaggccgatggcgtcctttgctcggaagagtatgaagatgaacaaagccctgaaaagattatcgagctgtatgcggagtgcatcaggctctttcactccatcgacatatcggattgtccctatacgaatagcttagacagccgcttagccgaattggattacttactgaataacgatctggccgatgtggattgcgaaaactgggaagaagacactccatttaaagatccgcgcgagctgtatgattttttaaagacggaaaagcccgaagaggaacttgtcttttcccacggcgacctgggagacagcaacatctttgtgaaagatggcaaagtaagtggctttattgatcttgggagaagcggcagggcggacaagtggtatgacattgccttctgcgtccggtcgatcagggaggatatcggggaagaacagtatgtcgagctattttttgacttactggggatcaagcctgattgggagaaaataaaatattatattttactggatgaattgttttagtacctagatgtggcgcaacgatgccggcgacaagcaggagcgcaccgacttcttccgcatcaagtgttttggctctcaggccgaggcccacggcaagtatttgggcaaggggtcgctggtattcgtgcagggcaagattcggaataccaagtacgagaaggacggccagacggtctacgggaccgacttcattgccgataaggtggattatctggacaccaaggcaccaggcgggtcaaatcaggaataagggcacattgccccggcgtgagtcggggcaatcccgcaaggagggtgaatgaatcggacgtttgaccggaaggcatacaggcaagaactgatcgacgcggggttttccgccgaggatgccgaaaccatcgcaagccgcaccgtcatgcgtgcgccccgcgaaaccttccagtccgtcggctcgatggtccagcaagctacggccaagatcgagcgcgacagcgtgcaactggctccccctgccctgcccgcgccatcggccgccgtggagcgttcgcgtcgtctcgaacaggaggcggcaggtttggcgaagtcgatgaccatcgacacgcgaggaactatgacgaccaagaagcgaaaaaccgccggcgaggacctggcaaaacaggtcagcgaggccaagcaggccgcgttgctgaaacacacgaagcagcagatcaaggaaatgcagctttccttgttcgatattgcgccgtggccggacacgatgcgagcgatgccaaacgacacggcccgctctgccctgttcaccacgcgcaacaagaaaatcccgcgcgaggcgctgcaaaacaaggtcattttccacgtcaacaaggacgtgaagatcacctacaccggcgtcgagctgcgggccgacgatgacgaactggtgtggcagcaggtgttggagtacgcgaagcgcacccctatcggcgagccgatcaccttcacgttctacgagctttgccaggacctgggctggtcgatcaatggccggtattacacgaaggccgaggaatgcctgtcgcgcctacaggcgacggcgatgggcttcacgtccgaccgcgttgggcacctggaatcggtgtcgctgctgcaccgcttccgcgtcctggaccgtggcaagaaaacgtcccgttgccaggtcctgatcgacgaggaaatcgtcgtgctgtttgctggcgaccactacacgaaattcatatgggagaagtaccgcaagctgtcgccgacggcccgacggatgttcgactatttcagctcgcaccgggagccgtacccgctcaagctggaaaccttccgcctcatgtgcggatcggattccacccgcgtgaagaagtggcgcgagcaggtcggcgaagcctgcgaagagttgcgaggcagcggcctggtggaacacgcctgggtcaatgatgacctggtgcattgcaaacgctagggccttgtggggtcagttccggctgggggttcagcagccagcgctttactggcatttcaggaacaagcgggcactgctcgacgcacttgcttcgctcagtatcgctcgggacgcacggcgcgctctacgaactgccgatagacaactgtcacggttaagcgagaaatgaataagaaggctgataattcggatctctgcgagggagatgatatttgatcacaggcagcaacgctctgtcatcgttacaatcaacatgctaccctccgcgagatcatccgtgtttcaaacccggcagcttagttgccgttcttccgaatagcatcggtaacatgagcaaagtctgccgccttacaacggctctcccgctgacgccgtcccggactgatgggctgcctgtatcgagtggtgattttgtgccgagctgccggtcggggagctgttggctggctggtggcaggatatattgtggtgtaaacaaattgacgcttagacaacttaataacacattgcggacgtttttaatgtactggggtggtttttcttttcaccagtgagacgggcaacagctgattgcccttcaccgcctggccctgagagagttgcagcaagcggtccacgctggtttgccccagcaggcgaaaatcctgtttgatggtggttccgaaatcggcaaaatcccttataaatcaaaagaatagcccgagatagggttgagtgttgttccagtttggaacaagagtccactattaaagaacgtggactccaacgtcaaagggcgaaaaaccgtctatcagggcgatggcccacggccgctctagaactagtggatcccccctacgtgcgatctagtaacatagatgacaccgcgcgcgataatttatcctagtttgcgcgctatattttgttttctatcgcgtattaaatgtataattgcgggactctaatcataaaaacccatctcataaataacgtcatgcattacatgttaattattacatgcttaacgtaattcaacagaaattatatgataatcatcgcaagaccggcaacaggattcaatcttaagaaactttattgccaaatgtttgaacgatccctcagaagaactcgtcaagaaggcgatagaaggcgatgcgctgcgaatcgggagcggcgataccgtaaagcacgaggaagcggtcagcccattcgccgccaagctcttcagcaatatcacgggtagccaacgctatgtcctgatagcggtccgccacacccagccggccacagtcgatgaatccagaaaagcggccattttccaccatgatattcggcaagcaggcatcgccatgggtcacgacgagatcctcgccgtcgggcatgcgcgccttgagcctggcgaacagttcggctggcgcgagcccctgatgctcttcgtccagatcatcctgatcgacaagaccggcttccatccgagtacgtgctcgctcgatgcgatgtttcgcttggtggtcgaatgggcaggtagccggatcaagcgtatgcagccgccgcattgcatcagccatgatggatactttctcggcaggagcaaggtgagatgacaggagatcctgccccggcacttcgcccaatagcagccagtcccttcccgcttcagtgacaacgtcgagcacagctgcgcaaggaacgcccgtcgtggccagccacgatagccgcgctgcctcgtcctggagttcattcagggcaccggacaggtcggtcttgacaaaaagaaccgggcgcccctgcgctgacagccggaacacggcggcatcagagcagccgattgtctgttgtgcccagtcatagccgaatagcctctccacccaagcggccggagaacctgcgtgcaatccatcttgttcaatcatctgttaatcagaaaaactcagattaatcgacaaattcgatcgcacaaactagaaactaacaccagatctagatagaaatcacaaatcgaagagtaattattcgacaaaactcaaattatttgaacaaatcggatgatatttatgaaaccctaatcgagaattaagatgatatctaacgatcaaacccagaaaatcgtcttcgatctaagattaacagaatctaaaccaaagaacatatacgaaattgggatcgaacgaaaacaaaatcgaagattttgagagaataaggaacacagaaatttaccttgatcacggtagagagaattgagagaaagtttttaagattttgagaaattgaaatctgaattgtgaagaagaagagctctttgggtattgttttatagaagaagaagaagaaaagacgaggacgactaggtcacgagaaagctaaggcggtgaagcaatagctaataataaaatgacacgtgtattgagcgttgtttacacgcaaagttgtttttggctaattgccttatttttaggttgaggaaaagtatttgtgctttgagttgataaacacgactcgtgtgtgccggctgcaaccactttgacgccgtttattactgactcgtcgacaaccacaatttctaacggtcgtcataagatccagccgttgagatttaacgatcgttacgatttatatttttttagcattatcgttttattttttaaatatacggtggagctgaaaattggcaataattgaaccgtgggtcccactgcattgaagcgtatttcgtattttctagaattcttcgtgctttatttcttttcctttttgtttttttttgccatttatctaatgcaagtgggcttataaaatcagtgaatttcttggaaaagtaacttctttatcgtataacatattgtgaaattatccatttcttttaattttttagtgttattggatatttttgtatgattattgatttgcataggataatgacttttgtatcaagttggtgaacaagtctcgttaaaaaaggcaagtggtttggtgactcgatttattcttgttatttaattcatatatcaatggatcttatttggggcctggtccatatttaacactcgtgttcagtccaatgaccaataatattttttcattaataacaatgtaacaagaatgatacacaaaacattctttgaataagttcgctatgaagaagggaacttatccggtcctagatcatcagttcatacaaacctccatagagttcaacatcttaaacaaggatatcctgatccgttgacggcgcgccaagcggccgcaaaacccctcacaaatacataaaaaaaattctttatttaattatcaaactctccactacctttcccaccaaccgttacaatcctgaatgttggaaaaaactaactacattgatataaaaaaactacattacttcctaaatcatatcaaaattgtataaatatatccactcaaaggagtctagaagatccacttggacaaattgcccatagttggaaagatgttcaccaagtcaacaagatttatcaatggaaaaatccatctaccaaacttactttcaagaaaatccaaggattatagagtaaaaaatctatgtattattaagtcaaaaagaaaaccaaagtgaacaaatattgatgtacaagtttgagaggataagacattggaatcgtctaaccaggaggcggaggaattccctagacagttaaaagtggccggaatcccggtaaaaaagattaaaatttttttgtagagggagtgcttgaatcatgttttttatgatggaaatagattcagcaccatcaaaaacattcaggacacctaaaattttgaagtttaacaaaaataacttggatctacaaaaatccgtatcggattttctctaaatataactagaattttcataactttcaaagcaactcctcccctaaccgtaaaacttttcctacttcaccgttaattacattccttaagagtagataaagaaataaagtaaataaaagtattcacaaaccaacaatttatttcttttatttacttaaaaaaacaaaaagtttatttattttacttaaatggcataatgacatatcggagatccctcgaacgagaatcttttatctccctggttttgtattaaaaagtaatttattgtggggtccacgcggagttggaatcctacagacgcgctttacatacgtctcgagaagcgtgacggatgtgcgaccggatgaccctgtataacccaccgacacagccagcgcacagtatacacgtgtcatttctctattggaaaatgtcgttgttatccccgctggtacgcaaccaccgatggtgacaggtcgtctgttgtcgtgtcgcgtagcgggagaagggtctcatccaacgctattaaatactcgccttcaccgcgttacttctcatcttttctcttgcgttgtataatcagtgcgatattctcagagagcttttcattcaaaggtatggagttttgaagggctttactcttaacatttgtttttctttgtaaattgttaatggtggtttctgtgggggaagaatcttttgccaggtccttttgggtttcgcatgtttatttgggttatttttctcgactatggctgacattactagggctttcgtgctttcatctgtgttttcttcccttaataggtctgtctctctggaatatttaattttcgtatgtaagttatgagtagtcgctgtttgtaataggctcttgtctgtaaaggtttcagcaggtgtttgcgttttattgcgtcatgtgtttcagaaggcctttgcagattattgcgttgtactttaatattttgtctccaaccttgttatagtttccctcctttgatctcacaggaaccctttcttctttgagcattttcttgtggcgttctgtagtaatattttaattttgggcccgggttctgagggtaggtgattattcacagtgatgtgctttccctataaggtcctctatgtgtaagctgttagggtttgtgcgttactattgacatgtcacatgtcacatattttcttcctcttatccttcgaactgatggttctttttctaattcgtggattgctggtgccatattttatttctattgcaactgtattttagggtgtctctttctttttgatttcttgttaatatttgtgttcaggttgtaactatgggttgctagggtgtctgccctcttcttttgtgcttctttcgcagaatctgtccgttggtctgtatttgggtgatgaattatttattccttgaagtatctgtctaattagcttgtgatgatgtgcaggtatattcgttagtcatatttcaatttcaagcgatcccccgggctgcaggctagtggatccaaagaattcggcacgaggccgtcctgtcctgactggaatttttgtttcactcgttctgccccgtctggattgggctgcactgaaatacattgaacattggagttgtcgagcgcgagatatgggtcagcagtccctcatttacagctttgttgcaaggggcacggtggtcttggccgagtacacccaattcacgggcaatttcacaacaattgccaatcaatgccttcagaagattcctgccagcaataataagttcacctacaattgcgatcgtcacacattcaattatctcgtcgaagatggttacacatactgtgttgttgcagatgaatcagttggaagacaactaccaattgcctttctggagcgcattaaggatgacttcaagaaacgatatggtggtggaaaagctgacacagctgttgctcacagcctcaacaaagactttggaccaaaattgaaagatcatatgcagtattgtgttgatcacccagaagagattaacaaacttgcaaaagtgaaggctcaggtttctgaagttaaaggcgtaatgatggagaatattgagaaggtccttgatcggggtgaaaagatagaacttttggttgacaaaacagagaaccttcgatttcaggctcaagacttccagaagcagggaacacaacttcgccgaaaaatgtggtttcagaacatgaaagtcaaactggttgttcttggaattgtctttgtgttgattcttataatctggctctcaatttgccatggatttaagtgccattaatcttgattacttggcagtcctttctagatacaatcctttcgaggcatttatattcattttttggcagcttggcttataatagatgcaggctctctttgaaaagagtatcttttgtgttgtgtctgagtaatgtatttcattcacttggatactgtcatcattagatactgattatctatgtttttctctgacgagggacaatgcctcgactcttcatagtttaggttattggcactacccatcagctgtgatgtcaatctcttttataaatactcgagagtacttttcctaggatcgatgggtgttatttgtggataataaattcgggtgatgttcagtgtttgtcgtatttctcacgaataaattgtgtttatgtatgtgttagtgttgtttgtctgtttcagaccctcttatgttatatttttcttttcgtcggtcagttgaagccaatactggtgtcctggccggcactgcaataccatttcgtttaatataaagactctgttatccgtgagctcgaatttccccgatcgttcaaacatttggcaataaagtttcttaagattgaatcctgttgccggtcttgcgatgattatcatataatttctgttgaattacgttaagcatgtaataattaacatgtaatgcatgacgttatttatgagatgggtttttatgattagagtcccgcaattatacatttaatacgcgatagaaaacaaaatatagcgcgcaaactaggataaattatcgcgcgcggtgtcatctatgttactagatcgcggccgcatttaaatgggccctgttaactggtaccttaattaaaagtttaaactatcagtgtttgacaggatatattggcgggtaaacctaagagaaaagagcgtttattagaataatcggatatttaaaagggcgtgaaaaggtttatccgttcgtccatttgtatgtgcatgccaaccacagggttccccagatc

SEQ ID NO: 2427 - DNA, 10168 bp, Artificial Sequence
  Plasmid pAGK365
cgccggcgttgtggatacctcgcggaaaacttggccctcactgacagatgaggggcggacgttgacacttgaggggccgactcacccggcgcggcgttgacagatgaggggcaggctcgatttcggccggcgacgtggagctggccagcctcgcaaatcggcgaaaacgcctgattttacgcgagtttcccacagatgatgtggacaagcctggggataagtgccctgcggtattgacacttgaggggcgcgactactgacagatgaggggcgcgatccttgacacttgaggggcagagtgctgacagatgaggggcgcacctattgacatttgaggggctgtccacaggcagaaaatccagcatttgcaagggtttccgcccgtttttcggccaccgctaacctgtcttttaacctgcttttaaaccaatatttataaaccttgtttttaaccagggctgcgccctgtgcgcgtgaccgcgcacgccgaaggggggtgcccccccttctcgaaccctcccggcccgctaacgcgggcctcccatccccccaggggctgcgcccctcggccgcgaacggcctcaccccaaaaatggcagcgctggcagtccataattgtggtttcaaaatcggctccgtcgatactatgttatacgccaactttgaaaacaactttgaaaaagctgttttctggtatttaaggttttagaatgcaaggaacagtgaattggagttcgtcttgttataattagcttcttggggtatctttaaatactgtagaaaagaggaaggaaataataaatggctaaaatgagaatatcaccggaattgaaaaaactgatcgaaaaataccgctgcgtaaaagatacggaaggaatgtctcctgctaaggtatataagctggtgggagaaaatgaaaacctatatttaaaaatgacggacagccggtataaagggaccacctatgatgtggaacgggaaaaggacatgatgctatggctggaaggaaagctgcctgttccaaaggtcctgcactttgaacggcatgatggctggagcaatctgctcatgagtgaggccgatggcgtcctttgctcggaagagtatgaagatgaacaaagccctgaaaagattatcgagctgtatgcggagtgcatcaggctctttcactccatcgacatatcggattgtccctatacgaatagcttagacagccgcttagccgaattggattacttactgaataacgatctggccgatgtggattgcgaaaactgggaagaagacactccatttaaagatccgcgcgagctgtatgattttttaaagacggaaaagcccgaagaggaacttgtcttttcccacggcgacctgggagacagcaacatctttgtgaaagatggcaaagtaagtggctttattgatcttgggagaagcggcagggcggacaagtggtatgacattgccttctgcgtccggtcgatcagggaggatatcggggaagaacagtatgtcgagctattttttgacttactggggatcaagcctgattgggagaaaataaaatattatattttactggatgaattgttttagtacctagatgtggcgcaacgatgccggcgacaagcaggagcgcaccgacttcttccgcatcaagtgttttggctctcaggccgaggcccacggcaagtatttgggcaaggggtcgctggtattcgtgcagggcaagattcggaataccaagtacgagaaggacggccagacggtctacgggaccgacttcattgccgataaggtggattatctggacaccaaggcaccaggcgggtcaaatcaggaataagggcacattgccccggcgtgagtcggggcaatcccgcaaggagggtgaatgaatcggacgtttgaccggaaggcatacaggcaagaactgatcgacgcggggttttccgccgaggatgccgaaaccatcgcaagccgcaccgtcatgcgtgcgccccgcgaaaccttccagtccgtcggctcgatggtccagcaagctacggccaagatcgagcgcgacagcgtgcaactggctccccctgccctgcccgcgccatcggccgccgtggagcgttcgcgtcgtctcgaacaggaggcggcaggtttggcgaagtcgatgaccatcgacacgcgaggaactatgacgaccaagaagcgaaaaaccgccggcgaggacctggcaaaacaggtcagcgaggccaagcaggccgcgttgctgaaacacacgaagcagcagatcaaggaaatgcagctttccttgttcgatattgcgccgtggccggacacgatgcgagcgatgccaaacgacacggcccgctctgccctgttcaccacgcgcaacaagaaaatcccgcgcgaggcgctgcaaaacaaggtcattttccacgtcaacaaggacgtgaagatcacctacaccggcgtcgagctgcgggccgacgatgacgaactggtgtggcagcaggtgttggagtacgcgaagcgcacccctatcggcgagccgatcaccttcacgttctacgagctttgccaggacctgggctggtcgatcaatggccggtattacacgaaggccgaggaatgcctgtcgcgcctacaggcgacggcgatgggcttcacgtccgaccgcgttgggcacctggaatcggtgtcgctgctgcaccgcttccgcgtcctggaccgtggcaagaaaacgtcccgttgccaggtcctgatcgacgaggaaatcgtcgtgctgtttgctggcgaccactacacgaaattcatatgggagaagtaccgcaagctgtcgccgacggcccgacggatgttcgactatttcagctcgcaccgggagccgtacccgctcaagctggaaaccttccgcctcatgtgcggatcggattccacccgcgtgaagaagtggcgcgagcaggtcggcgaagcctgcgaagagttgcgaggcagcggcctggtggaacacgcctgggtcaatgatgacctggtgcattgcaaacgctagggccttgtggggtcagttccggctgggggttcagcagccagcgctttactggcatttcaggaacaagcgggcactgctcgacgcacttgcttcgctcagtatcgctcgggacgcacggcgcgctctacgaactgccgatagacaactgtcacggttaagcgagaaatgaataagaaggctgataattcggatctctgcgagggagatgatatttgatcacaggcagcaacgctctgtcatcgttacaatcaacatgctaccctccgcgagatcatccgtgtttcaaacccggcagcttagttgccgttcttccgaatagcatcggtaacatgagcaaagtctgccgccttacaacggctctcccgctgacgccgtcccggactgatgggctgcctgtatcgagtggtgattttgtgccgagctgccggtcggggagctgttggctggctggtggcaggatatattgtggtgtaaacaaattgacgcttagacaacttaataacacattgcggacgtttttaatgtactggggtggtttttcttttcaccagtgagacgggcaacagctgattgcccttcaccgcctggccctgagagagttgcagcaagcggtccacgctggtttgccccagcaggcgaaaatcctgtttgatggtggttccgaaatcggcaaaatcccttataaatcaaaagaatagcccgagatagggttgagtgttgttccagtttggaacaagagtccactattaaagaacgtggactccaacgtcaaagggcgaaaaaccgtctatcagggcgatggcccacggccgctctagaactagtggatcccccctacgtgcgatctagtaacatagatgacaccgcgcgcgataatttatcctagtttgcgcgctatattttgttttctatcgcgtattaaatgtataattgcgggactctaatcataaaaacccatctcataaataacgtcatgcattacatgttaattattacatgcttaacgtaattcaacagaaattatatgataatcatcgcaagaccggcaacaggattcaatcttaagaaactttattgccaaatgtttgaacgatccctcagaagaactcgtcaagaaggcgatagaaggcgatgcgctgcgaatcgggagcggcgataccgtaaagcacgaggaagcggtcagcccattcgccgccaagctcttcagcaatatcacgggtagccaacgctatgtcctgatagcggtccgccacacccagccggccacagtcgatgaatccagaaaagcggccattttccaccatgatattcggcaagcaggcatcgccatgggtcacgacgagatcctcgccgtcgggcatgcgcgccttgagcctggcgaacagttcggctggcgcgagcccctgatgctcttcgtccagatcatcctgatcgacaagaccggcttccatccgagtacgtgctcgctcgatgcgatgtttcgcttggtggtcgaatgggcaggtagccggatcaagcgtatgcagccgccgcattgcatcagccatgatggatactttctcggcaggagcaaggtgagatgacaggagatcctgccccggcacttcgcccaatagcagccagtcccttcccgcttcagtgacaacgtcgagcacagctgcgcaaggaacgcccgtcgtggccagccacgatagccgcgctgcctcgtcctggagttcattcagggcaccggacaggtcggtcttgacaaaaagaaccgggcgcccctgcgctgacagccggaacacggcggcatcagagcagccgattgtctgttgtgcccagtcatagccgaatagcctctccacccaagcggccggagaacctgcgtgcaatccatcttgttcaatcatctgttaatcagaaaaactcagattaatcgacaaattcgatcgcacaaactagaaactaacaccagatctagatagaaatcacaaatcgaagagtaattattcgacaaaactcaaattatttgaacaaatcggatgatatttatgaaaccctaatcgagaattaagatgatatctaacgatcaaacccagaaaatcgtcttcgatctaagattaacagaatctaaaccaaagaacatatacgaaattgggatcgaacgaaaacaaaatcgaagattttgagagaataaggaacacagaaatttaccttgatcacggtagagagaattgagagaaagtttttaagattttgagaaattgaaatctgaattgtgaagaagaagagctctttgggtattgttttatagaagaagaagaagaaaagacgaggacgactaggtcacgagaaagctaaggcggtgaagcaatagctaataataaaatgacacgtgtattgagcgttgtttacacgcaaagttgtttttggctaattgccttatttttaggttgaggaaaagtatttgtgctttgagttgataaacacgactcgtgtgtgccggctgcaaccactttgacgccgtttattactgactcgtcgacaaccacaatttctaacggtcgtcataagatccagccgttgagatttaacgatcgttacgatttatatttttttagcattatcgttttattttttaaatatacggtggagctgaaaattggcaataattgaaccgtgggtcccactgcattgaagcgtatttcgtattttctagaattcttcgtgctttatttcttttcctttttgtttttttttgccatttatctaatgcaagtgggcttataaaatcagtgaatttcttggaaaagtaacttctttatcgtataacatattgtgaaattatccatttcttttaattttttagtgttattggatatttttgtatgattattgatttgcataggataatgacttttgtatcaagttggtgaacaagtctcgttaaaaaaggcaagtggtttggtgactcgatttattcttgttatttaattcatatatcaatggatcttatttggggcctggtccatatttaacactcgtgttcagtccaatgaccaataatattttttcattaataacaatgtaacaagaatgatacacaaaacattctttgaataagttcgctatgaagaagggaacttatccggtcctagatcatcagttcatacaaacctccatagagttcaacatcttaaacaaggatatcctgatccgttgacggcgcgccaagcggccgcggccgggtggtgacatttattcataaattcatctcaaaacaagaaggatttacaaaaataaaagaaaacaaaattttcatctttaacataattataattgtgttcacaaaattcaaacttaaacccttaatataaagaatttctttcaacaatacactttaatcacaacttcttcaatcacaacctcctccaacaaaattaaaatagattaataaataaataaacttaactatttaaaaaaaaatattatacaaaatttattaaaacttcaaaataaacaaactttttatacaaaattcatcaaaactttaaaataaagctaaacactgaaaatgtgagtacatttaaaaggacgctgatcacaaaaattttgaaaacataaacaaacttgaaactctaccttttaagaatgagtttgtcgtctcattaactcattagttttatagttcgaatccaattaacgtatcttttattttatggaataagggtgttttaataagtgattttgggatttttttagtaatttatttgtgatatgttatggagtttttaaaaatatatatatatatatatatttttgggttgagtttacttaaaatttggaaaaggttggtaagaactataaattgagttgtgaatgagtgttttatggattttttaagatgttaaatttatatatgtaattaaaattttattttgaataacaaaaattataattggataaaaaattgttttgttaaatttagagtaaaaatttcaaaatctaaaataattaaacactattatttttaaaaaatttgttggtaaattttatcttatatttaagttaaaatttagaaaaaattaattttaaattaataaacttttgaagtcaaatattccaaatattttccaaaatattaaatctattttgcattcaaaatacaatttaaataataaaacttcatggaatagattaaccaatttgtataaaaaccaaaaatctcaaataaaatttaaattacaaaacattatcaacattatgatttcaagaaagacaataaccagtttccaataaaataaaaaacctcatggcccgtaattaagatctcattaattaattcttattttttaatttttttacatagaaaatatctttatattgtatccaagaaatatagaatgttctcgtccagggactattaatctccaaacaagtttcaaaatcattacattaaagctcatcatgtcatttgtggattggaaattatattgtataagagaaatatagaatgttctcgtctagggactattaatttccaaacaaatttcaaaatcattacattaaagctcatcatgtcatttgtggattggaaattagacaaaaaaaatcccaaatatttctctcaatctcccaaaatatagttcgaactccatatttttggaaattgagaatttttttacccaataatatatttttttatacattttagagattttccagacatatttgctctgggatttattggaatgaaggttgagttataaactttcagtaatccaagtatcttcggtttttgaagatactaaatccattatataataaaaacacattttaaacaccaatttaatgggatttcagatttgtatcccatgctattggctaaggcatttttcttattgtaatctaaccaattctaatttccacctggtgtgaactgactgacaaatgcggtccgaaaacagcgaatgaaatgtctgggtgatcggtcaaacaagcggtgggcgagagagcgcgggtgttggcctagccgggatgggggtaggtagacggcgtattaccggcgagttgtccgaatggagttttcggggtaggtagtaacgtagacgtcaatggaaaaagtcataatctccgtcaaaaatccaaccgctccttcacatcgcagagttggtggccacgggaccctccacccactcactcgatcgcctgccgtggttgcccattattcaaccatacgccacttgactcttcaccaacaattccaggccggctttctatacaatgtactgcacaggaaaatccaatataaaaagccggcctctgcttccttctcagtagcccccagctcattcaattcttcccactgcaggctagtggatccaaagaattcggcacgaggccgtcctgtcctgactggaatttttgtttcactcgttctgccccgtctggattgggctgcactgaaatacattgaacattggagttgtcgagcgcgagatatgggtcagcagtccctcatttacagctttgttgcaaggggcacggtggtcttggccgagtacacccaattcacgggcaatttcacaacaattgccaatcaatgccttcagaagattcctgccagcaataataagttcacctacaattgcgatcgtcacacattcaattatctcgtcgaagatggttacacatactgtgttgttgcagatgaatcagttggaagacaactaccaattgcctttctggagcgcattaaggatgacttcaagaaacgatatggtggtggaaaagctgacacagctgttgctcacagcctcaacaaagactttggaccaaaattgaaagatcatatgcagtattgtgttgatcacccagaagagattaacaaacttgcaaaagtgaaggctcaggtttctgaagttaaaggcgtaatgatggagaatattgagaaggtccttgatcggggtgaaaagatagaacttttggttgacaaaacagagaaccttcgatttcaggctcaagacttccagaagcagggaacacaacttcgccgaaaaatgtggtttcagaacatgaaagtcaaactggttgttcttggaattgtctttgtgttgattcttataatctggctctcaatttgccatggatttaagtgccattaatcttgattacttggcagtcctttctagatacaatcctttcgaggcatttatattcattttttggcagcttggcttataatagatgcaggctctctttgaaaagagtatcttttgtgttgtgtctgagtaatgtatttcattcacttggatactgtcatcattagatactgattatctatgtttttctctgacgagggacaatgcctcgactcttcatagtttaggttattggcactacccatcagctgtgatgtcaatctcttttataaatactcgagagtacttttcctaggatcgatgggtgttatttgtggataataaattcgggtgatgttcagtgtttgtcgtatttctcacgaataaattgtgtttatgtatgtgttagtgttgtttgtctgtttcagaccctcttatgttatatttttcttttcgtcggtcagttgaagccaatactggtgtcctggccggcactgcaataccatttcgtttaatataaagactctgttatccgtgagctcgaatttccccgatcgttcaaacatttggcaataaagtttcttaagattgaatcctgttgccggtcttgcgatgattatcatataatttctgttgaattacgttaagcatgtaataattaacatgtaatgcatgacgttatttatgagatgggtttttatgattagagtcccgcaattatacatttaatacgcgatagaaaacaaaatatagcgcgcaaactaggataaattatcgcgcgcggtgtcatctatgttactagatcgcggccgcatttaaatgggccctgttaactggtaccttaattaaaagtttaaactatcagtgtttgacaggatatattggcgggtaaacctaagagaaaagagcgtttattagaataatcggatatttaaaagggcgtgaaaaggtttatccgttcgtccatttgtatgtgcatgccaaccacagggttccccagatc

SEQ ID NO: 2428 - DNA, 11698 bp, Artificial Sequence
  Plasmid pAGSM89
cgccggcgttgtggatacctcgcggaaaacttggccctcactgacagatgaggggcggacgttgacacttgaggggccgactcacccggcgcggcgttgacagatgaggggcaggctcgatttcggccggcgacgtggagctggccagcctcgcaaatcggcgaaaacgcctgattttacgcgagtttcccacagatgatgtggacaagcctggggataagtgccctgcggtattgacacttgaggggcgcgactactgacagatgaggggcgcgatccttgacacttgaggggcagagtgctgacagatgaggggcgcacctattgacatttgaggggctgtccacaggcagaaaatccagcatttgcaagggtttccgcccgtttttcggccaccgctaacctgtcttttaacctgcttttaaaccaatatttataaaccttgtttttaaccagggctgcgccctgtgcgcgtgaccgcgcacgccgaaggggggtgcccccccttctcgaaccctcccggcccgctaacgcgggcctcccatccccccaggggctgcgcccctcggccgcgaacggcctcaccccaaaaatggcagcgctggcagtccataattgtggtccaatttgcagccgtccgagacaggaggacatcgtccagctgaaaccggggcagaatccggccatttctgaagagaaaaatggtaaactgatagaataaaatcataagaaaggagccgcacatgaaaaaagcagtcattaacggggaacaaatcagaagtatcagcgacctccaccagacattgaaaaaggagcttgcccttccggaatactacggtgaaaacctggacgctttatgggattgtctgaccggatgggtggagtacccgctcgttttggaatggaggcagtttgaacaaagcaagcagctgactgaaaatggcgccgagagtgtgcttcaggttttccgtgaagcgaaagcggaaggctgcgacatcaccatcatactttcttaatacgatcaatgggagaggaacaatatggaaacacaaaccacaattgtggtttcaaaatcggctccgtcgatactatgttatacgccaactttgaaaacaactttgaaaaagctgttttctggtatttaaggttttagaatgcaaggaacagtgaattggagttcgtcttgttataattagcttcttggggtatctttaaatactgtagaaaagaggaaggaaataataaatggctaaaatgagaatatcaccggaattgaaaaaactgatcgaaaaataccgctgcgtaaaagatacggaaggaatgtctcctgctaaggtatataagctggtgggagaaaatgaaaacctatatttaaaaatgacggacagccggtataaagggaccacctatgatgtggaacgggaaaaggacatgatgctatggctggaaggaaagctgcctgttccaaaggtcctgcactttgaacggcatgatggctggagcaatctgctcatgagtgaggccgatggcgtcctttgctcggaagagtatgaagatgaacaaagccctgaaaagattatcgagctgtatgcggagtgcatcaggctctttcactccatcgacatatcggattgtccctatacgaatagcttagacagccgcttagccgaattggattacttactgaataacgatctggccgatgtggattgcgaaaactgggaagaagacactccatttaaagatccgcgcgagctgtatgattttttaaagacggaaaagcccgaagaggaacttgtcttttcccacggcgacctgggagacagcaacatctttgtgaaagatggcaaagtaagtggctttattgatcttgggagaagcggcagggcggacaagtggtatgacattgccttctgcgtccggtcgatcagggaggatatcggggaagaacagtatgtcgagctattttttgacttactggggatcaagcctgattgggagaaaataaaatattatattttactggatgaattgttttagtacctagatgtggcgcaacgatgccggcgacaagcaggagcgcaccgacttcttccgcatcaagtgttttggctctcaggccgaggcccacggcaagtatttgggcaaggggtcgctggtattcgtgcagggcaagattcggaataccaagtacgagaaggacggccagacggtctacgggaccgacttcattgccgataaggtggattatctggacaccaaggcaccaggcgggtcaaatcaggaataagggcacattgccccggcgtgagtcggggcaatcccgcaaggagggtgaatgaatcggacgtttgaccggaaggcatacaggcaagaactgatcgacgcggggttttccgccgaggatgccgaaaccatcgcaagccgcaccgtcatgcgtgcgccccgcgaaaccttccagtccgtcggctcgatggtccagcaagctacggccaagatcgagcgcgacagcgtgcaactggctccccctgccctgcccgcgccatcggccgccgtggagcgttcgcgtcgtctcgaacaggaggcggcaggtttggcgaagtcgatgaccatcgacacgcgaggaactatgacgaccaagaagcgaaaaaccgccggcgaggacctggcaaaacaggtcagcgaggccaagcaggccgcgttgctgaaacacacgaagcagcagatcaaggaaatgcagctttccttgttcgatattgcgccgtggccggacacgatgcgagcgatgccaaacgacacggcccgctctgccctgttcaccacgcgcaacaagaaaatcccgcgcgaggcgctgcaaaacaaggtcattttccacgtcaacaaggacgtgaagatcacctacaccggcgtcgagctgcgggccgacgatgacgaactggtgtggcagcaggtgttggagtacgcgaagcgcacccctatcggcgagccgatcaccttcacgttctacgagctttgccaggacctgggctggtcgatcaatggccggtattacacgaaggccgaggaatgcctgtcgcgcctacaggcgacggcgatgggcttcacgtccgaccgcgttgggcacctggaatcggtgtcgctgctgcaccgcttccgcgtcctggaccgtggcaagaaaacgtcccgttgccaggtcctgatcgacgaggaaatcgtcgtgctgtttgctggcgaccactacacgaaattcatatgggagaagtaccgcaagctgtcgccgacggcccgacggatgttcgactatttcagctcgcaccgggagccgtacccgctcaagctggaaaccttccgcctcatgtgcggatcggattccacccgcgtgaagaagtggcgcgagcaggtcggcgaagcctgcgaagagttgcgaggcagcggcctggtggaacacgcctgggtcaatgatgacctggtgcattgcaaacgctagggccttgtggggtcagttccggctgggggttcagcagccagcgctttactggcatttcaggaacaagcgggcactgctcgacgcacttgcttcgctcagtatcgctcgggacgcacggcgcgctctacgaactgccgatagacaactgtcacggttaagcgagaaatgaataagaaggctgataattcggatctctgcgagggagatgatatttgatcacaggcagcaacgctctgtcatcgttacaatcaacatgctaccctccgcgagatcatccgtgtttcaaacccggcagcttagttgccgttcttccgaatagcatcggtaacatgagcaaagtctgccgccttacaacggctctcccgctgacgccgtcccggactgatgggctgcctgtatcgagtggtgattttgtgccgagctgccggtcggggagctgttggctggctggtggcaggatatattgtggtgtaaacaaattgacgcttagacaacttaataacacattgcggacgtttttaatgtactggggtggtttttcttttcaccagtgagacgggcaacagctgattgcccttcaccgcctggccctgagagagttgcagcaagcggtccacgctggtttgccccagcaggcgaaaatcctgtttgatggtggttccgaaatcggcaaaatcccttataaatcaaaagaatagcccgagatagggttgagtgttgttccagtttggaacaagagtccactattaaagaacgtggactccaacgtcaaagggcgaaaaaccgtctatcagggcgatggcccacggccgctctagaactagtggatcccccctacgtgcgatctagtaacatagatgacaccgcgcgcgataatttatcctagtttgcgcgctatattttgttttctatcgcgtattaaatgtataattgcgggactctaatcataaaaacccatctcataaataacgtcatgcattacatgttaattattacatgcttaacgtaattcaacagaaattatatgataatcatcgcaagaccggcaacaggattcaatcttaagaaactttattgccaaatgtttgaacgatccctcagaagaactcgtcaagaaggcgatagaaggcgatgcgctgcgaatcgggagcggcgataccgtaaagcacgaggaagcggtcagcccattcgccgccaagctcttcagcaatatcacgggtagccaacgctatgtcctgatagcggtccgccacacccagccggccacagtcgatgaatccagaaaagcggccattttccaccatgatattcggcaagcaggcatcgccatgggtcacgacgagatcctcgccgtcgggcatgcgcgccttgagcctggcgaacagttcggctggcgcgagcccctgatgctcttcgtccagatcatcctgatcgacaagaccggcttccatccgagtacgtgctcgctcgatgcgatgtttcgcttggtggtcgaatgggcaggtagccggatcaagcgtatgcagccgccgcattgcatcagccatgatggatactttctcggcaggagcaaggtgagatgacaggagatcctgccccggcacttcgcccaatagcagccagtcccttcccgcttcagtgacaacgtcgagcacagctgcgcaaggaacgcccgtcgtggccagccacgatagccgcgctgcctcgtcctggagttcattcagggcaccggacaggtcggtcttgacaaaaagaaccgggcgcccctgcgctgacagccggaacacggcggcatcagagcagccgattgtctgttgtgcccagtcatagccgaatagcctctccacccaagcggccggagaacctgcgtgcaatccatcttgttcaatcatctgttaatcagaaaaactcagattaatcgacaaattcgatcgcacaaactagaaactaacaccagatctagatagaaatcacaaatcgaagagtaattattcgacaaaactcaaattatttgaacaaatcggatgatatttatgaaaccctaatcgagaattaagatgatatctaacgatcaaacccagaaaatcgtcttcgatctaagattaacagaatctaaaccaaagaacatatacgaaattgggatcgaacgaaaacaaaatcgaagattttgagagaataaggaacacagaaatttaccttgatcacggtagagagaattgagagaaagtttttaagattttgagaaattgaaatctgaattgtgaagaagaagagctctttgggtattgttttatagaagaagaagaagaaaagacgaggacgactaggtcacgagaaagctaaggcggtgaagcaatagctaataataaaatgacacgtgtattgagcgttgtttacacgcaaagttgtttttggctaattgccttatttttaggttgaggaaaagtatttgtgctttgagttgataaacacgactcgtgtgtgccggctgcaaccactttgacgccgtttattactgactcgtcgacaaccacaatttctaacggtcgtcataagatccagccgttgagatttaacgatcgttacgatttatatttttttagcattatcgttttattttttaaatatacggtggagctgaaaattggcaataattgaaccgtgggtcccactgcattgaagcgtatttcgtattttctagaattcttcgtgctttatttcttttcctttttgtttttttttgccatttatctaatgcaagtgggcttataaaatcagtgaatttcttggaaaagtaacttctttatcgtataacatattgtgaaattatccatttcttttaattttttagtgttattggatatttttgtatgattattgatttgcataggataatgacttttgtatcaagttggtgaacaagtctcgttaaaaaaggcaagtggtttggtgactcgatttattcttgttatttaattcatatatcaatggatcttatttggggcctggtccatatttaacactcgtgttcagtccaatgaccaataatattttttcattaataacaatgtaacaagaatgatacacaaaacattctttgaataagttcgctatgaagaagggaacttatccggtcctagatcatcagttcatacaaacctccatagagttcaacatcttaaacaaggatatcctgatccgttgacggcgcgccaagcggccgcatttaaatgggccctatctaatcgaattttgtaaactggtttgataagccatcaatgcatcagtcaagaatgaatcattgcaactaagttgatataattcaatttaccatagaactcaaatgttgatatcttcttatggattttctgatcttctacattattagaaagaaacttgatttaccagtaatgatgatacatatccaatagaacgaaataagccaatctttataggttttggtagtaaagttacaacatcagagacatgtatgtattgtctctcagaagagctcttgaccgatcagagtttgaagaaaaatttattacacactttatgtaaagctgaaaaaaacggcctcccgcagggaagccgtttttttcgttatctgatttttgtaaaggtctgatactcgtccgttgttttgtaaatcagccagtcgcttgagtaaagaatccggtctgaatttctgaagcctgatgtatagttaatatccgcttcacgccatgttcgtccgcttttgcccgggagtttgccttccctgtttgagaagatgtctccgccgatgcttttccccggagcgacgtctgcaaggttcccttttgatgccacccagccgagggcttgtgcttctgattttgtaatgtaattatcaggtagcttatgatatgtctgaagataatccgcaaccccgtcaaacgtgttgataacctgtgccataaatcttctaaaaacagcagaactgactattcaaagaaagtagaacccacagaaagtaatcaaagtagtttgattaaatgcgttgtgtatcatcgcagcccctgctacggatatttataggaaaggtttgagagcaatgtgtgcagcaagttgtgtgtgaatcacctgcttccatggcggaggataaataatttagtcacgcatttagttgaacgtaactactaactcctctaccgctaatcattcttcttttgcccgggcaagttcaacaacaaccccacaatcacgcttcctgtattttgttttgttttcaaaacaatagaattcactttttactgccaaaattatgttttactcgagagcccgggctcctgcaattgaagcttctgttaacttgctagtccagatctgcggccgcgatctagtaacatagatgacaccgcgcgcgataatttatcctagtttgcgcgctatattttgttttctatcgcgtattaaatgtataattgcgggactctaatcataaaaacccatctcataaataacgtcatgcattacatgttaattattacatgcttaacgtaattcaacagaaattatatgataatcatcgcaagaccggcaacaggattcaatcttaagaaactttattgccaaatgtttgaacgatcggggaaattcgagctcacggataacagagtctttatattaaacgaaatggtattgcagtgccggccaggacaccagtattggcttcaactgaccgacgaaaagaaaaatataacataagagggtctgaaacagacaaacaacactaacacatacataaacacaatttattcgtgagaaatacgacaaacactgaacatcacccgaatttattatccacaaataacacccatcgatcctaggaaaagtactctcgagtatttataaaagagattgacatcacagctgatgggtagtgccaataacctaaactatgaagagtcgaggcattgtccctcgtcagagaaaaacatagataatcagtatctaatgatgacagtatccaagtgaatgaaatacattactcagacacaacacaaaagatactcttttcaaagagagcctgcatctattataagccaagctgccaaaaaatgaatataaatgcctcgaaaggattgtatctagaaaggactgccaagtaatcaagattaatggcacttaaatccatggcaaattgagagccagattataagaatcaacacaaagacaattccaagaacaaccagtttgactttcatgttctgaaaccacatttttcggcgaagttgtgttccctgcttctggaagtcttgagcctgaaatcgaaggttctctgttttgtcaaccaaaagttctatcttttcaccccgatcaaggaccttctcaatattctccatcattacgcctttaacttcagaaacctgagccttcacttttgcaagtttgttaatctcttctgggtgatcaacacaatactgcatatgatctttcaattttggtccaaagtctttgttgaggctgtgagcaacagctgtgtcagcttttccaccaccatatcgtttcttgaagtcatccttaatgcgctccagaaaggcaattggtagttgtcttccaactgattcatctgcaacaacacagtatgtgtaaccatcttcgacgagataattgaatgtgtgacgatcgcaattgtaggtgaacttattattgctggcaggaatcttctgaaggcattgattggcaattgttgtgaaattgcccgtgaattgggtgtactcggccaagaccaccgtgccccttgcaacaaagctgtaaatgagggactgctgacccatatctcgcgctcgacaactccaatgttcaatgtatttcagtgcagcccaatccagacggggcagaacgagtgaaacaaaaattccagtcaggacaggacggcctcgtgccgaattctttggatccactagcctgcagcccgggggatcgcttgaaattgaaatatgactaacgaatatacctgcacatcatcacaagctaattagacagatacttcaaggaataaataattcatcacccaaatacagaccaacggacagattctgcgaaagaagcacaaaagaagagggcagacaccctagcaacccatagttacaacctgaacacaaatattaacaagaaatcaaaaagaaagagacaccctaaaatacagttgcaatagaaataaaatatggcaccagcaatccacgaattagaaaaagaaccatcagttcgaaggataagaggaagaaaatatgtgacatgtgacatgtcaatagtaacgcacaaaccctaacagcttacacatagaggaccttatagggaaagcacatcactgtgaataatcacctaccctcagaacccgggcccaaaattaaaatattactacagaacgccacaagaaaatgctcaaagaagaaagggttcctgtgagatcaaaggagggaaactataacaaggttggagacaaaatattaaagtacaacgcaataatctgcaaaggccttctgaaacacatgacgcaataaaacgcaaacacctgctgaaacctttacagacaagagcctattacaaacagcgactactcataacttacatacgaaaattaaatattccagagagacagacctattaagggaagaaaacacagatgaaagcacgaaagccctagtaatgtcagccatagtcgagaaaaataacccaaataaacatgcgaaacccaaaaggacctggcaaaagattcttcccccacagaaaccaccattaacaatttacaaagaaaaacaaatgttaagagtaaagcccttcaaaactccatacctttgaatgaaaagctctctgagaatatcgcactgattatacaacgcaagagaaaagatgagaagtaacgcggtgaaggcgagtatttaatagcgttggatgagacccttctcccgctacgcgacacgacaacagacgacctgtcaccatcggtggttgcgtaccagcggggataacaacgacattttccaatagagaaatgacacgtgtatactgtgcgctggctgtgtcggtgggttatacagggtcatccggtcgcacatccgtcacgcttctcgagacgtatgtaaagcgcgtctgtaggattccaactccgcgtggaccccacaataaattactttttaatacaaaaccagggagataaaagattctcgttcgagggatctccgatatgtcattatgccatttaagtaaaataaataaactttttgtttttttaagtaaataaaagaaataaattgttggtttgtgaatacttttatttactttatttctttatctactcttaaggaatgtaattaacggtgaagtaggaaaagttttacggttaggggaggagttgctttgaaagttatgaaaattctagttatatttagagaaaatccgatacggatttttgtagatccaagttatttttgttaaacttcaaaattttaggtgtcctgaatgtttttgatggtgctgaatctatttccatcataaaaaacatgattcaagcactccctctacaaaaaaattttaatcttttttaccgggattccggccacttttaactgtctagggaattcctccgcctcctggttagacgattccaatgtcttatcctctcaaacttgtacatcaatatttgttcactttggttttctttttgacttaataatacatagattttttactctataatccttggattttcttgaaagtaagtttggtagatggatttttccattgataaatcttgttgacttggtgaacatctttccaactatgggcaatttgtccaagtggatcttctagactcctttgagtggatatatttatacaattttgatatgatttaggaagtaatgtagtttttttatatcaatgtagttagttttttccaacattcaggattgtaacggttggtgggaaaggtagtggagagtttgataattaaataaagaattttttttatgtatttgtgaggggttttgcggccgcagatctggactagcttctgcaggtaccttaattaaaagtttaaactatcagtgtttgacaggatatattggcgggtaaacctaagagaaaagagcgtttattagaataatcggatatttaaaagggcgtgaaaaggtttatccgttcgtccatttgtatgtgcatgccaaccacagggttccccagatc

SEQ ID NO: 2429 - DNA, 10273 bp, Artificial Sequence
  Plasmid pSPN1
cgccggcgttgtggatacctcgcggaaaacttggccctcactgacagatgaggggcggacgttgacacttgaggggccgactcacccggcgcggcgttgacagatgaggggcaggctcgatttcggccggcgacgtggagctggccagcctcgcaaatcggcgaaaacgcctgattttacgcgagtttcccacagatgatgtggacaagcctggggataagtgccctgcggtattgacacttgaggggcgcgactactgacagatgaggggcgcgatccttgacacttgaggggcagagtgctgacagatgaggggcgcacctattgacatttgaggggctgtccacaggcagaaaatccagcatttgcaagggtttccgcccgtttttcggccaccgctaacctgtcttttaacctgcttttaaaccaatatttataaaccttgtttttaaccagggctgcgccctgtgcgcgtgaccgcgcacgccgaaggggggtgcccccccttctcgaaccctcccggcccgctaacgcgggcctcccatccccccaggggctgcgcccctcggccgcgaacggcctcaccccaaaaatggcagcgctggcagtccataattgtggtttcaaaatcggctccgtcgatactatgttatacgccaactttgaaaacaactttgaaaaagctgttttctggtatttaaggttttagaatgcaaggaacagtgaattggagttcgtcttgttataattagcttcttggggtatctttaaatactgtagaaaagaggaaggaaataataaatggctaaaatgagaatatcaccggaattgaaaaaactgatcgaaaaataccgctgcgtaaaagatacggaaggaatgtctcctgctaaggtatataagctggtgggagaaaatgaaaacctatatttaaaaatgacggacagccggtataaagggaccacctatgatgtggaacgggaaaaggacatgatgctatggctggaaggaaagctgcctgttccaaaggtcctgcactttgaacggcatgatggctggagcaatctgctcatgagtgaggccgatggcgtcctttgctcggaagagtatgaagatgaacaaagccctgaaaagattatcgagctgtatgcggagtgcatcaggctctttcactccatcgacatatcggattgtccctatacgaatagcttagacagccgcttagccgaattggattacttactgaataacgatctggccgatgtggattgcgaaaactgggaagaagacactccatttaaagatccgcgcgagctgtatgattttttaaagacggaaaagcccgaagaggaacttgtcttttcccacggcgacctgggagacagcaacatctttgtgaaagatggcaaagtaagtggctttattgatcttgggagaagcggcagggcggacaagtggtatgacattgccttctgcgtccggtcgatcagggaggatatcggggaagaacagtatgtcgagctattttttgacttactggggatcaagcctgattgggagaaaataaaatattatattttactggatgaattgttttagtacctagatgtggcgcaacgatgccggcgacaagcaggagcgcaccgacttcttccgcatcaagtgttttggctctcaggccgaggcccacggcaagtatttgggcaaggggtcgctggtattcgtgcagggcaagattcggaataccaagtacgagaaggacggccagacggtctacgggaccgacttcattgccgataaggtggattatctggacaccaaggcaccaggcgggtcaaatcaggaataagggcacattgccccggcgtgagtcggggcaatcccgcaaggagggtgaatgaatcggacgtttgaccggaaggcatacaggcaagaactgatcgacgcggggttttccgccgaggatgccgaaaccatcgcaagccgcaccgtcatgcgtgcgccccgcgaaaccttccagtccgtcggctcgatggtccagcaagctacggccaagatcgagcgcgacagcgtgcaactggctccccctgccctgcccgcgccatcggccgccgtggagcgttcgcgtcgtctcgaacaggaggcggcaggtttggcgaagtcgatgaccatcgacacgcgaggaactatgacgaccaagaagcgaaaaaccgccggcgaggacctggcaaaacaggtcagcgaggccaagcaggccgcgttgctgaaacacacgaagcagcagatcaaggaaatgcagctttccttgttcgatattgcgccgtggccggacacgatgcgagcgatgccaaacgacacggcccgctctgccctgttcaccacgcgcaacaagaaaatcccgcgcgaggcgctgcaaaacaaggtcattttccacgtcaacaaggacgtgaagatcacctacaccggcgtcgagctgcgggccgacgatgacgaactggtgtggcagcaggtgttggagtacgcgaagcgcacccctatcggcgagccgatcaccttcacgttctacgagctttgccaggacctgggctggtcgatcaatggccggtattacacgaaggccgaggaatgcctgtcgcgcctacaggcgacggcgatgggcttcacgtccgaccgcgttgggcacctggaatcggtgtcgctgctgcaccgcttccgcgtcctggaccgtggcaagaaaacgtcccgttgccaggtcctgatcgacgaggaaatcgtcgtgctgtttgctggcgaccactacacgaaattcatatgggagaagtaccgcaagctgtcgccgacggcccgacggatgttcgactatttcagctcgcaccgggagccgtacccgctcaagctggaaaccttccgcctcatgtgcggatcggattccacccgcgtgaagaagtggcgcgagcaggtcggcgaagcctgcgaagagttgcgaggcagcggcctggtggaacacgcctgggtcaatgatgacctggtgcattgcaaacgctagggccttgtggggtcagttccggctgggggttcagcagccagcgctttactggcatttcaggaacaagcgggcactgctcgacgcacttgcttcgctcagtatcgctcgggacgcacggcgcgctctacgaactgccgatagacaactgtcacggttaagcgagaaatgaataagaaggctgataattcggatctctgcgagggagatgatatttgatccggtgtgaaataccgcacagatgcgtaaggagaaaataccgcatcaggcgctcttccgcttcctcgctcactgactcgctgcgctcggtcgttcggctgcggcgagcggtatcagctcactcaaaggcggtaatacggttatccacagaatcaggggataacgcaggaaagaacatgtgagcaaaaggccagcaaaaggccaggaaccgtaaaaaggccgcgttgctggcgtttttccataggctccgcccccctgacgagcatcacaaaaatcgacgctcaagtcagaggtggcgaaacccgacaggactataaagataccaggcgtttccccctggaagctccctcgtgcgctctcctgttccgaccctgccgcttaccggatacctgtccgcctttctcccttcgggaagcgtggcgctttctcatagctcacgctgtaggtatctcagttcggtgtaggtcgttcgctccaagctgggctgtgtgcacgaaccccccgttcagcccgaccgctgcgccttatccggtaactatcgtcttgagtccaacccggtaagacacgacttatcgccactggcagcagccactggtaacaggattagcagagcgaggtatgtaggcggtgctacagagttcttgaagtggtggcctaactacggctacactagaaggacagtatttggtatctgcgctctgctgaagccagttaccttcggaaaaagagttggtagctcttgatccggcaaacaaaccaccgctggtagcggtggtttttttgtttgcaagcagcagattacgcgcagaaaaaaaggatatcaagaagatcctttgatcttttctacggggtctgacgctcagtggaacgaaaactcacgttaagggattttggtcatgagattatcaaaaaggatcttcacctagatccttttaaattaaaaatgaagttttaaatcaatctaaagtatatatgagtaaacttggtctgacagttaccaatgcttcatcagtgaggctgatcacaggcagcaacgctctgtcatcgttacaatcaacatgctaccctccgcgagatcatccgtgtttcaaacccggcagcttagttgccgttcttccgaatagcatcggtaacatgagcaaagtctgccgccttacaacggctctcccgctgacgccgtcccggactgatgggctgcctgtatcgagtggtgattttgtgccgagctgccggtcggggagctgttggctggctggtggcaggatatattgtggtgtaaacaaattgacgcttagacaacttaataacacaccgcggtctagaactagctagtggatcgatcccccctacgtgcgatctagtaacatagatgacaccgcgcgcgataatttatcctagtttgcgcgctatattttgttttctatcgcgtattaaatgtataattgcgggactctaatcataaaaacccatctcataaataacgtcatgcattacatgttaattattacatgcttaacgtaattcaacagaaattatatgataatcatcgcaagaccggcaacaggattcaatcttaagaaactttattgccaaatgtttgaacgatccctcagaagaactcgtcaagaaggcgatagaaggcgatgcgctgcgaatcgggagcggcgataccgtaaagcacgaggaagcggtcagcccattcgccgccaagctcttcagcaatatcacgggtagccaacgctatgtcctgatagcggtccgccacacccagccggccacagtcgatgaatccagaaaagcggccattttccaccatgatattcggcaagcaggcatcgccatgggtcacgacgagatcctcgccgtcgggcatgcgcgccttgagcctggcgaacagttcggctggcgcgagcccctgatgctcttcgtccagatcatcctgatcgacaagaccggcttccatccgagtacgtgctcgctcgatgcgatgtttcgcttggtggtcgaatgggcaggtagccggatcaagcgtatgcagccgccgcattgcatcagccatgatggatactttctcggcaggagcaaggtgagatgacaggagatcctgccccggcacttcgcccaatagcagccagtcccttcccgcttcagtgacaacgtcgagcacagctgcgcaaggaacgcccgtcgtggccagccacgatagccgcgctgcctcgtcctggagttcattcagggcaccggacaggtcggtcttgacaaaaagaaccgggcgcccctgcgctgacagccggaacacggcggcatcagagcagccgattgtctgttgtgcccagtcatagccgaatagcctctccacccaagcggccggagaacctgcgtgcaatccatcttgttcaatcatctgttaatcagaaaaactcagattaatcgacaaattcgatcgcacaaactagaaactaacaccagatctagatagaaatcacaaatcgaagagtaattattcgacaaaactcaaattatttgaacaaatcggatgatatttatgaaaccctaatcgagaattaagatgatatctaacgatcaaacccagaaaatcgtcttcgatctaagattaacagaatctaaaccaaagaacatatacgaaattgggatcgaacgaaaacaaaatcgaagattttgagagaataaggaacacagaaatttaccttgatcacggtagagagaattgagagaaagtttttaagattttgagaaattgaaatctgaattgtgaagaagaagagctctttgggtattgttttatagaagaagaagaagaaaagacgaggacgactaggtcacgagaaagctaaggcggtgaagcaatagctaataataaaatgacacgtgtattgagcgttgtttacacgcaaagttgtttttggctaattgccttatttttaggttgaggaaaagtatttgtgctttgagttgataaacacgactcgtgtgtgccggctgcaaccactttgacgccgtttattactgactcgtcgacaaccacaatttctaacggtcgtcataagatccagccgttgagatttaacgatcgttacgatttatatttttttagcattatcgttttattttttaaatatacggtggagctgaaaattggcaataattgaaccgtgggtcccactgcattgaagcgtatttcgtattttctagaattcttcgtgctttatttcttttcctttttgtttttttttgccatttatctaatgcaagtgggcttataaaatcagtgaatttcttggaaaagtaacttctttatcgtataacatattgtgaaattatccatttcttttaattttttagtgttattggatatttttgtatgattattgatttgcataggataatgacttttgtatcaagttggtgaacaagtctcgttaaaaaaggcaagtggtttggtgactcgatttattcttgttatttaattcatatatcaatggatcttatttggggcctggtccatatttaacactcgtgttcagtccaatgaccaataatattttttcattaataacaatgtaacaagaatgatacacaaaacattctttgaataagttcgctatgaagaagggaacttatccggtcctagatcatcagttcatacaaacctccatagagttcaacatcttaaacaaggatatcctgatccgttgacggcgcgccaagcggccgcatttgggctcctgcaggtaccgggccccccctcgagagcccaaatgcggccgcggccgggtggtgacatttattcataaattcatctcaaaacaagaaggatttacaaaaataaaagaaaacaaaattttcatctttaacataattataattgtgttcacaaaattcaaacttaaacccttaatataaagaatttctttcaacaatacactttaatcacaacttcttcaatcacaacctcctccaacaaaattaaaatagattaataaataaataaacttaactatttaaaaaaaaatattatacaaaatttattaaaacttcaaaataaacaaactttttatacaaaattcatcaaaactttaaaataaagctaaacactgaaaatgtgagtacatttaaaaggacgctgatcacaaaaattttgaaaacataaacaaacttgaaactctaccttttaagaatgagtttgtcgtctcattaactcattagttttatagttcgaatccaattaacgtatcttttattttatggaataagggtgttttaataagtgattttgggatttttttagtaatttatttgtgatatgttatggagtttttaaaaatatatatatatatatatatttttgggttgagtttacttaaaatttggaaaaggttggtaagaactataaattgagttgtgaatgagtgttttatggattttttaagatgttaaatttatatatgtaattaaaattttattttgaataacaaaaattataattggataaaaaattgttttgttaaatttagagtaaaaatttcaaaatctaaaataattaaacactattatttttaaaaaatttgttggtaaattttatcttatatttaagttaaaatttagaaaaaattaattttaaattaataaacttttgaagtcaaatattccaaatattttccaaaatattaaatctattttgcattcaaaatacaatttaaataataaaacttcatggaatagattaaccaatttgtataaaaaccaaaaatctcaaataaaatttaaattacaaaacattatcaacattatgatttcaagaaagacaataaccagtttccaataaaataaaaaacctcatggcccgtaattaagatctcattaattaattcttattttttaatttttttacatagaaaatatctttatattgtatccaagaaatatagaatgttctcgtccagggactattaatctccaaacaagtttcaaaatcattacattaaagctcatcatgtcatttgtggattggaaattatattgtataagagaaatatagaatgttctcgtctagggactattaatttccaaacaaatttcaaaatcattacattaaagctcatcatgtcatttgtggattggaaattagacaaaaaaaatcccaaatatttctctcaatctcccaaaatatagttcgaactccatatttttggaaattgagaatttttttacccaataatatatttttttatacattttagagattttccagacatatttgctctgggatttattggaatgaaggttgagttataaactttcagtaatccaagtatcttcggtttttgaagatactaaatccattatataataaaaacacattttaaacaccaatttaatgggatttcagatttgtatcccatgctattggctaaggcatttttcttattgtaatctaaccaattctaatttccacctggtgtgaactgactgacaaatgcggtccgaaaacagcgaatgaaatgtctgggtgatcggtcaaacaagcggtgggcgagagagcgcgggtgttggcctagccgggatgggggtaggtagacggcgtattaccggcgagttgtccgaatggagttttcggggtaggtagtaacgtagacgtcaatggaaaaagtcataatctccgtcaaaaatccaaccgctccttcacatcgcagagttggtggccacgggaccctccacccactcactcgatcgcctgccgtggttgcccattattcaaccatacgccacttgactcttcaccaacaattccaggccggctttctatacaatgtactgcacaggaaaatccaatataaaaagccggcctctgcttccttctcagtagcccccagctcattcaattcttcccactgcaggctacatttgtcagacacgttttccgccatttttcgcctgtttctgcggagaatttgatcaggttcggattgggattgaatcaattgaaaggtttttattttcagtatttcgatcgccggatcccccgggctgcaggaattcgcgaattgccaacgaaccggatacccgtccgcaaggtgcacgggaatatttcgcgccactggcggaagcaacgcgtaaactcgacccgacgcgtccgatcacctgcgtcaatgtaatgttctgcgacgctcacaccgataccatcagcgatctctttgatgtgctgtgcctgaaccgttattacggatggtatgtccaaagcggcgatttggaaacggcagagaaggtactggaaaaagaacttctggcctggcaggagaaactgcatcagccgattatcatcaccgaatacggcgtggatacgttagccgggctgcactcaaactagttctagagcggccgcatggtttgtaagccctaaattttgttcaaagatttgaactcacagaaacaacataatttagctaacaatgcttaaaggcaacatgcaagcaaatttaacgaggacaagacagagacaaaatcacacaaagcataagaaatacataagtagtatctgttatagcatggtagtgcaagctaattcttatagcatggtagtgcttgcataaaacatacagaaaagatgtctttcactagctaataacattgttaggagtcttatgatcaagcttgcactaccatgctataacagatactacttatgtatttcttatgctttgtgtgattttgtctctgtcttgtcctcgttaaatttgcttgcatgttgcctttaagcattgttagctaaattatgttgtttctgtgagttcaaatctttgaacaaaatttagggcttacaaaccatgcggccgccaccgcggtggaaactatcagtgtttgacaggatatattggcgggtaaacctaagagaaaagagcgtttattagaataatcggatatttaaaagggcgtgaaaaggtttatccgttcgtccatttgtatgtgcatgccaaccacagggttccccagatc

SEQ ID NO: 2430 - DNA, 9444 bp, Artificial Sequence
  Plasmid pARB1151
cgccggcgttgtggatacctcgcggaaaacttggccctcactgacagatgaggggcggacgttgacacttgaggggccgactcacccggcgcggcgttgacagatgaggggcaggctcgatttcggccggcgacgtggagctggccagcctcgcaaatcggcgaaaacgcctgattttacgcgagtttcccacagatgatgtggacaagcctggggataagtgccctgcggtattgacacttgaggggcgcgactactgacagatgaggggcgcgatccttgacacttgaggggcagagtgctgacagatgaggggcgcacctattgacatttgaggggctgtccacaggcagaaaatccagcatttgcaagggtttccgcccgtttttcggccaccgctaacctgtcttttaacctgcttttaaaccaatatttataaaccttgtttttaaccagggctgcgccctgtgcgcgtgaccgcgcacgccgaaggggggtgcccccccttctcgaaccctcccggcccgctaacgcgggcctcccatccccccaggggctgcgcccctcggccgcgaacggcctcaccccaaaaatggcagcgctggcagtccataattgtggtccaatttgcagccgtccgagacaggaggacatcgtccagctgaaaccggggcagaatccggccatttctgaagagaaaaatggtaaactgatagaataaaatcataagaaaggagccgcacatgaaaaaagcagtcattaacggggaacaaatcagaagtatcagcgacctccaccagacattgaaaaaggagcttgcccttccggaatactacggtgaaaacctggacgctttatgggattgtctgaccggatgggtggagtacccgctcgttttggaatggaggcagtttgaacaaagcaagcagctgactgaaaatggcgccgagagtgtgcttcaggttttccgtgaagcgaaagcggaaggctgcgacatcaccatcatactttcttaatacgatcaatgggagaggaacaatatggaaacacaaaccacaattgtggtttcaaaatcggctccgtcgatactatgttatacgccaactttgaaaacaactttgaaaaagctgttttctggtatttaaggttttagaatgcaaggaacagtgaattggagttcgtcttgttataattagcttcttggggtatctttaaatactgtagaaaagaggaaggaaataataaatggctaaaatgagaatatcaccggaattgaaaaaactgatcgaaaaataccgctgcgtaaaagatacggaaggaatgtctcctgctaaggtatataagctggtgggagaaaatgaaaacctatatttaaaaatgacggacagccggtataaagggaccacctatgatgtggaacgggaaaaggacatgatgctatggctggaaggaaagctgcctgttccaaaggtcctgcactttgaacggcatgatggctggagcaatctgctcatgagtgaggccgatggcgtcctttgctcggaagagtatgaagatgaacaaagccctgaaaagattatcgagctgtatgcggagtgcatcaggctctttcactccatcgacatatcggattgtccctatacgaatagcttagacagccgcttagccgaattggattacttactgaataacgatctggccgatgtggattgcgaaaactgggaagaagacactccatttaaagatccgcgcgagctgtatgattttttaaagacggaaaagcccgaagaggaacttgtcttttcccacggcgacctgggagacagcaacatctttgtgaaagatggcaaagtaagtggctttattgatcttgggagaagcggcagggcggacaagtggtatgacattgccttctgcgtccggtcgatcagggaggatatcggggaagaacagtatgtcgagctattttttgacttactggggatcaagcctgattgggagaaaataaaatattatattttactggatgaattgttttagtacctagatgtggcgcaacgatgccggcgacaagcaggagcgcaccgacttcttccgcatcaagtgttttggctctcaggccgaggcccacggcaagtatttgggcaaggggtcgctggtattcgtgcagggcaagattcggaataccaagtacgagaaggacggccagacggtctacgggaccgacttcattgccgataaggtggattatctggacaccaaggcaccaggcgggtcaaatcaggaataagggcacattgccccggcgtgagtcggggcaatcccgcaaggagggtgaatgaatcggacgtttgaccggaaggcatacaggcaagaactgatcgacgcggggttttccgccgaggatgccgaaaccatcgcaagccgcaccgtcatgcgtgcgccccgcgaaaccttccagtccgtcggctcgatggtccagcaagctacggccaagatcgagcgcgacagcgtgcaactggctccccctgccctgcccgcgccatcggccgccgtggagcgttcgcgtcgtctcgaacaggaggcggcaggtttggcgaagtcgatgaccatcgacacgcgaggaactatgacgaccaagaagcgaaaaaccgccggcgaggacctggcaaaacaggtcagcgaggccaagcaggccgcgttgctgaaacacacgaagcagcagatcaaggaaatgcagctttccttgttcgatattgcgccgtggccggacacgatgcgagcgatgccaaacgacacggcccgctctgccctgttcaccacgcgcaacaagaaaatcccgcgcgaggcgctgcaaaacaaggtcattttccacgtcaacaaggacgtgaagatcacctacaccggcgtcgagctgcgggccgacgatgacgaactggtgtggcagcaggtgttggagtacgcgaagcgcacccctatcggcgagccgatcaccttcacgttctacgagctttgccaggacctgggctggtcgatcaatggccggtattacacgaaggccgaggaatgcctgtcgcgcctacaggcgacggcgatgggcttcacgtccgaccgcgttgggcacctggaatcggtgtcgctgctgcaccgcttccgcgtcctggaccgtggcaagaaaacgtcccgttgccaggtcctgatcgacgaggaaatcgtcgtgctgtttgctggcgaccactacacgaaattcatatgggagaagtaccgcaagctgtcgccgacggcccgacggatgttcgactatttcagctcgcaccgggagccgtacccgctcaagctggaaaccttccgcctcatgtgcggatcggattccacccgcgtgaagaagtggcgcgagcaggtcggcgaagcctgcgaagagttgcgaggcagcggcctggtggaacacgcctgggtcaatgatgacctggtgcattgcaaacgctagggccttgtggggtcagttccggctgggggttcagcagccagcgctttactggcatttcaggaacaagcgggcactgctcgacgcacttgcttcgctcagtatcgctcgggacgcacggcgcgctctacgaactgccgatagacaactgtcacggttaagcgagaaatgaataagaaggctgataattcggatctctgcgagggagatgatatttgatcacaggcagcaacgctctgtcatcgttacaatcaacatgctaccctccgcgagatcatccgtgtttcaaacccggcagcttagttgccgttcttccgaatagcatcggtaacatgagcaaagtctgccgccttacaacggctctcccgctgacgccgtcccggactgatgggctgcctgtatcgagtggtgattttgtgccgagctgccggtcggggagctgttggctggctggtggcaggatatattgtggtgtaaacaaattgacgcttagacaacttaataacacattgcggacgtttttaatgtactggggtggtttttcttttcaccagtgagacgggcaacagctgattgcccttcaccgcctggccctgagagagttgcagcaagcggtccacgctggtttgccccagcaggcgaaaatcctgtttgatggtggttccgaaatcggcaaaatcccttataaatcaaaagaatagcccgagatagggttgagtgttgttccagtttggaacaagagtccactattaaagaacgtggactccaacgtcaaagggcgaaaaaccgtctatcagggcgatggcccacggccgctctagaactagctagtggatcgatcccccctacgtgcgatctagtaacatagatgacaccgcgcgcgataatttatcctagtttgcgcgctatattttgttttctatcgcgtattaaatgtataattgcgggactctaatcataaaaacccatctcataaataacgtcatgcattacatgttaattattacatgcttaacgtaattcaacagaaattatatgataatcatcgcaagaccggcaacaggattcaatcttaagaaactttattgccaaatgtttgaacgatccctcagaagaactcgtcaagaaggcgatagaaggcgatgcgctgcgaatcgggagcggcgataccgtaaagcacgaggaagcggtcagcccattcgccgccaagctcttcagcaatatcacgggtagccaacgctatgtcctgatagcggtccgccacacccagccggccacagtcgatgaatccagaaaagcggccattttccaccatgatattcggcaagcaggcatcgccatgggtcacgacgagatcctcgccgtcgggcatgcgcgccttgagcctggcgaacagttcggctggcgcgagcccctgatgctcttcgtccagatcatcctgatcgacaagaccggcttccatccgagtacgtgctcgctcgatgcgatgtttcgcttggtggtcgaatgggcaggtagccggatcaagcgtatgcagccgccgcattgcatcagccatgatggatactttctcggcaggagcaaggtgagatgacaggagatcctgccccggcacttcgcccaatagcagccagtcccttcccgcttcagtgacaacgtcgagcacagctgcgcaaggaacgcccgtcgtggccagccacgatagccgcgctgcctcgtcctggagttcattcagggcaccggacaggtcggtcttgacaaaaagaaccgggcgcccctgcgctgacagccggaacacggcggcatcagagcagccgattgtctgttgtgcccagtcatagccgaatagcctctccacccaagcggccggagaacctgcgtgcaatccatcttgttcaatcatctgttaatcagaaaaactcagattaatcgacaaattcgatcgcacaaactagaaactaacaccagatctagatagaaatcacaaatcgaagagtaattattcgacaaaactcaaattatttgaacaaatcggatgatatttatgaaaccctaatcgagaattaagatgatatctaacgatcaaacccagaaaatcgtcttcgatctaagattaacagaatctaaaccaaagaacatatacgaaattgggatcgaacgaaaacaaaatcgaagattttgagagaataaggaacacagaaatttaccttgatcacggtagagagaattgagagaaagtttttaagattttgagaaattgaaatctgaattgtgaagaagaagagctctttgggtattgttttatagaagaagaagaagaaaagacgaggacgactaggtcacgagaaagctaaggcggtgaagcaatagctaataataaaatgacacgtgtattgagcgttgtttacacgcaaagttgtttttggctaattgccttatttttaggttgaggaaaagtatttgtgctttgagttgataaacacgactcgtgtgtgccggctgcaaccactttgacgccgtttattactgactcgtcgacaaccacaatttctaacggtcgtcataagatccagccgttgagatttaacgatcgttacgatttatatttttttagcattatcgttttattttttaaatatacggtggagctgaaaattggcaataattgaaccgtgggtcccactgcattgaagcgtatttcgtattttctagaattcttcgtgctttatttcttttcctttttgtttttttttgccatttatctaatgcaagtgggcttataaaatcagtgaatttcttggaaaagtaacttctttatcgtataacatattgtgaaattatccatttcttttaattttttagtgttattggatatttttgtatgattattgatttgcataggataatgacttttgtatcaagttggtgaacaagtctcgttaaaaaaggcaagtggtttggtgactcgatttattcttgttatttaattcatatatcaatggatcttatttggggcctggtccatatttaacactcgtgttcagtccaatgaccaataatattttttcattaataacaatgtaacaagaatgatacacaaaacattctttgaataagttcgctatgaagaagggaacttatccggtcctagatcatcagttcatacaaacctccatagagttcaacatcttaaacaaggatatcctgatccgttgacggcgcgccaagcggccgcaaaacccctcacaaatacataaaaaaaattctttatttaattatcaaactctccactacctttcccaccaaccgttacaatcctgaatgttggaaaaaactaactacattgatataaaaaaactacattacttcctaaatcatatcaaaattgtataaatatatccactcaaaggagtctagaagatccacttggacaaattgcccatagttggaaagatgttcaccaagtcaacaagatttatcaatggaaaaatccatctaccaaacttactttcaagaaaatccaaggattatagagtaaaaaatctatgtattattaagtcaaaaagaaaaccaaagtgaacaaatattgatgtacaagtttgagaggataagacattggaatcgtctaaccaggaggcggaggaattccctagacagttaaaagtggccggaatcccggtaaaaaagattaaaatttttttgtagagggagtgcttgaatcatgttttttatgatggaaatagattcagcaccatcaaaaacattcaggacacctaaaattttgaagtttaacaaaaataacttggatctacaaaaatccgtatcggattttctctaaatataactagaattttcataactttcaaagcaactcctcccctaaccgtaaaacttttcctacttcaccgttaattacattccttaagagtagataaagaaataaagtaaataaaagtattcacaaaccaacaatttatttcttttatttacttaaaaaaacaaaaagtttatttattttacttaaatggcataatgacatatcggagatccctcgaacgagaatcttttatctccctggttttgtattaaaaagtaatttattgtggggtccacgcggagttggaatcctacagacgcgctttacatacgtctcgagaagcgtgacggatgtgcgaccggatgaccctgtataacccaccgacacagccagcgcacagtatacacgtgtcatttctctattggaaaatgtcgttgttatccccgctggtacgcaaccaccgatggtgacaggtcgtctgttgtcgtgtcgcgtagcgggagaagggtctcatccaacgctattaaatactcgccttcaccgcgttacttctcatcttttctcttgcgttgtataatcagtgcgatattctcagagagcttttcattcaacccgggctgcaggaattcggtacccccatggatccagcagacggaagtagattgcgaggttctgaagcgctgctgcgaaaatctaacggaggagaacaggaggctgcagaaagaactgcaagagctaagggctttaaaggcggcgcctcagccgtgcgtgatagggcaggataattattacatgcctttgcctgccaccacgctaaccatgtgcccctcctgtgaaagggtggctaccatggaaaacagccgaagccttcaattctccaagtcacagatttctcagtttacccaacagtccgcagcctgttagtcttttattactaaactcatacttcagttttttgggttctttcaaggctccttcgataaggtttgccttgccttgtacgtttaaactcaaatcattccacacaggtcctttttttcccctgtccagatttcacccctttacaaacacatagaaatacaccatataatccttgtgggagaaatatttgactaacaataccaatagtgaacaaagtgcccgactagtaagctaattcttatagcatggtagtgcttgcataaagcatacagaaaagatgtctttcactagctaataacattgttaggagtcttatgatctgtacatcttcgcgacgggcactttgttcactattggtattgttagtcaaatatttctcccacaaggattatatggtgtatttctatgtgtttgtaaaggggtgaaatctggacaggggaaaaaaaggacctgtgtggaatgatttgagtttaaacgtacaaggcaaggcaaaccttatcgaaggagccttgaaagaacccaaaaaactgaagtatgagtttagtaataaaagactaacaggctgcggactgttgggtaaactgagaaatctgtgacttggagaattgaaggcttcggctgttttccatggtagccaccctttcacaggaggggcacatggttagcgtggtggcaggcaaaggcatgtaataattatcctgccctatcacgcacggctgaggcgccgcctttaaagcccttagctcttgcagttctttctgcagcctcctgttctcctccgttagattttcgcagcagcgcttcagaacctcgcaatctacttccgtctgctaagcttgcactaccatgctataacagatactacttatgtatttcttatgctttgtgtgattttgtctctgtcttgtcctcgttaaatttgcttgcatgttgcctttaagcattgttagctaaattatgttgtttctgtgagttcaaatctttgaacaaaatttagggcttacaaaccatgcggccgcatttaaatgggccctcgagagcccgggctcctgcaggtaccttaattaaaagtttaaactatcagtgtttgacaggatatattggcgggtaaacctaagagaaaagagcgtttattagaataatcggatatttaaaagggcgtgaaaaggtttatccgttcgtccatttgtatgtgcatgccaaccacagggttccccagatc

SEQ ID NO: 2431 - DNA, 52 bp, Artificial Sequence
  MCS of plasmids pOX28 and pAGSM49
tttcattcaacccgggctgcagaacaattggctagcaaagtacttaaagctt

SEQ ID NO: 2432 - DNA, 63 bp, Artificial Sequence
  MCS of plasmid pAGSM50
tttcattcaacccgggctgcagaaaggcctttatcgatgggctagcaaaagtacttaaagctt

1. An isolated polynucleotide comprising a sequence selected from the group consisting of: consisting of: SEQ ID NO: 1-591, 1183-1912, 1931-2106, 2371, 2374, 2377, 2385, 2387, 2389, 2391, 2393, 2395, 2397, 2399, 2401, 2403, 2405, 2407, 2409, 2411, 2413, 2415, 2417, 2419, and 2421.

2. An isolated polynucleotide comprising a sequence selected from the group consisting of:
(a) complements of a sequence of SEQ ID NO: 1-591, 1183-1912, 1931-2106, 2371, 2374, 2377, 2385, 2387, 2389, 2391, 2393, 2395, 2397, 2399, 2401, 2403, 2405, 2407, 2409, 2411, 2413, 2415, 2417, 2419, and 2421;
(b) reverse complements of a sequence of SEQ ID NO: 1-591, 1183-1912, 1931-2106, 2371, 2374, 2377, 2385, 2387, 2389, 2391, 2393, 2395, 2397, 2399, 2401, 2403, 2405, 2407, 2409, 2411, 2413, 2415, 2417, 2419, and 2421; and
(c) reverse sequences a sequence of SEQ ID NO: 1-591, 1183-1912, 1931-2106, 2371, 2374, 2377, 2385, 2387, 2389, 2391, 2393, 2395, 2397, 2399, 2401, 2403, 2405, 2407, 2409, 2411, 2413, 2415, 2417, 2419, and 2421.

3. An isolated polynucleotide comprising a sequence selected from the group consisting of:
(a) nucleotide sequences having at least 75% identity to a sequence of SEQ ID NO: 1-591, 1183-1912, 1931-2106, 2371, 2374, 2377, 2385, 2387, 2389, 2391, 2393, 2395, 2397, 2399, 2401, 2403, 2405, 2407, 2409, 2411, 2413, 2415, 2417, 2419, and 2421;
(b) nucleotide sequences having at least 90% identity to a sequence of SEQ ID NO: 1-591, 1183-1912, 1931-2106, 2371, 2374, 2377, 2385, 2387, 2389, 2391, 2393, 2395, 2397, 2399, 2401, 2403, 2405, 2407, 2409, 2411, 2413, 2415, 2417, 2419, and 2421;
(c) nucleotide sequence having at least 95% identity to a sequence of SEQ ID NO: 1-591, 1183-1912, 1931-2106, 2371, 2374, 2377, 2385, 2387, 2389, 2391, 2393, 2395, 2397, 2399, 2401, 2403, 2405, 2407, 2409, 2411, 2413, 2415, 2417, 2419, and 2421;
(d) nucleotide sequences that hybridize to a sequence of SEQ ID NO: 1-591, 1183-1912, 1931-2106, 2371, 2374, 2377, 2385, 2387, 2389, 2391, 2393, 2395, 2397, 2399, 2401, 2403, 2405, 2407, 2409, 2411, 2413, 2415, 2417, 2419, and 2421 under stringent hybridization conditions;
(e) nucleotide sequences that are 200-mers of a sequence of SEQ ID NO: 1-591, 1183-1912, 1931-2106, 2371, 2374, 2377, 2385, 2387, 2389, 2391, 2393, 2395, 2397, 2399, 2401, 2403, 2405, 2407, 2409, 2411, 2413, 2415, 2417, 2419, and 2421;
(f) nucleotide sequences that are 100-mers of a sequence of SEQ ID NO: 1-591, 1183-1912, 1931-2106, 2371, 2374, 2377, 2385, 2387, 2389, 2391, 2393, 2395, 2397, 2399, 2401, 2403, 2405, 2407, 2409, 2411, 2413, 2415, 2417, 2419, and 2421;
(g) nucleotide sequences that are 40-mers of a sequence of SEQ ID NO: 1-591, 1183-1912, 1931-2106, 2371, 2374, 2377, 2385, 2387, 2389, 2391, 2393, 2395, 2397, 2399, 2401, 2403, 2405, 2407, 2409, 2411, 2413, 2415, 2417, 2419, and 2421; and
(h) nucleotide sequences that are 20-mers of a sequence of SEQ ID NO: 1-591, 1183-1912, 1931-2106, 2371, 2374, 2377, 2385, 2387, 2389, 2391, 2393, 2395, 2397, 2399, 2401, 2403, 2405, 2407, 2409, 2411, 2413, 2415, 2417, 2419, and 2421; and
(i) nucleotide sequences that are degeneratively equivalent to a sequence of SEQ ID NO: 1-591, 1183-1912, 1931-2106, 2371, 2374, 2377, 2385, 2387, 2389, 2391, 2393, 2395, 2397, 2399, 2401, 2403, 2405, 2407, 2409, 2411, 2413, 2415, 2417, 2419, and 2421,
wherein the isolated polynucleotide encodes a transcription factor.

4. An oligonucleotide probe or primer comprising at least 10 contiguous residues complementary to 10 contiguous residues of a sequence of SEQ ID NO: 1-591, 1183-1912 and 1931-2106.

5. An isolated polypeptide encoded by a polynucleotide according to any one of claims 1-3.

6. An isolated polypeptide comprising an amino acid sequence selected from the group consisting of: SEQ ID NO: 592, 594-850, 852-930, 932-951, 953-1046, 1048-1182, 1913-1930, 2107-2293, 2296-2368, 2372, 2375, 2378, 2386, 2388, 2390, 2392, 2394, 2396, 2398, 2400, 2402, 2404, 2406, 2408, 2410, 2412, 2414, 2416, 2418, 2420, and 2422.

7. An isolated polypeptide comprising an amino acid sequence selected from the group consisting of:
(a) sequences having at least 75% identity to a sequence of SEQ ID NO: 592, 594-850, 852-930, 932-951, 953-1046, 1048-1182, 1913-1930, 2107-2293, 2296-2368, 2372, 2375, 2378, 2386, 2388, 2390, 2392, 2394, 2396, 2398, 2400, 2402, 2404, 2406, 2408, 2410, 2412, 2414, 2416, 2418, 2420, and 2422;
(b) sequences having at least 90% identity to a sequence of SEQ ID NO: 592, 594-850, 852-930, 932-951, 953-1046, 1048-1182, 1913-1930, 2107-2293, 2296-2368, 2372, 2375, 2378, 2386, 2388, 2390, 2392, 2394, 2396, 2398, 2400, 2402, 2404, 2406, 2408, 2410, 2412, 2414, 2416, 2418, 2420, and 2422; and
(c) sequences having at least 95% identity to a sequence of SEQ ID NO: 592, 594-850, 852-930, 932-951, 953-1046, 1048-1182, 1913-1930, 2107-2293, 2296-2368, 2372, 2375, 2378, 2386, 2388, 2390, 2392, 2394, 2396, 2398, 2400, 2402, 2404, 2406, 2408, 2410, 2412, 2414, 2416, 2418, 2420, and 2422,
wherein the isolated polypeptide functions as a transcription factor.

8. An isolated polynucleotide that encodes a polypeptide according to any one of claims 6 and 7.

9. A genetic construct comprising a polynucleotide according to any one of claims 1-3.

10. A transgenic cell comprising a genetic construct according to claim 9.

11. A genetic construct comprising, in the 5′-3′ direction:
(a) a gene promoter sequence;
(b) a polynucleotide sequence comprising at least one of the following: (1) a polynucleotide coding for a polypeptide comprising a sequence of 592, 594-850, 852-930, 932-951, 953-1046, 1048-1182, 1913-1930, 2107-2293, 2296-2368, 2372, 2375, 2378, 2386, 2388, 2390, 2392, 2394, 2396, 2398, 2400, 2402, 2404, 2406, 2408, 2410, 2412, 2414, 2416, 2418, 2420, and 2422; and (2) a polynucleotide comprising a non-coding region of a polynucleotide of any one of claims 1-3; and
(c) a gene termination sequence.

12. The genetic construct of claim 11 wherein the open reading frame is in a sense orientation.

13. The genetic construct of claim 11 wherein the open reading frame is in an antisense orientation.

14. A transgenic plant cell comprising a genetic construct of any one of claims 9 and 11.

15. A plant comprising a transgenic plant cell according to claim 14, or fruit or seeds or propagules thereof.

16. The plant of claim 15 wherein the plant is a woody plant.

17. The plant of claim 16 wherein the plant is selected from the group consisting of eucalyptus, pine, acacia, poplar, sweetgum, teak and mahogany species

18. A method for modifying gene expression in a plant comprising stably incorporating into the genome of the plant a genetic construct according to any one of claims 9 and 11.

19. The method of claim 18, wherein the plant is a woody plant.

20. The method of claim 18, wherein the plant is selected from the group consisting of eucalyptus, pine, acacia, poplar, sweetgum, teak and mahogany species.

21. A method for producing a plant having modified gene expression comprising:
(a) transforming a plant cell with a genetic construct according to any one of claims 9 and 11 to provide a transgenic cell; and
(b) cultivating the transgenic cell under conditions conducive to regeneration and mature plant growth.

22. The method of claim 21 wherein the plant is a woody plant.

23. The method of claim 21 wherein the plant is selected from the group consisting of eucalyptus, pine, acacia, poplar, sweetgum, teak and mahogany species.

24. A method for modifying the activity of a polypeptide in a plant comprising stably incorporating into the genome of the plant a genetic construct according to any one of claims 9 and 11.

25. The method of claim 24 wherein the plant is a woody plant.

26. The method of claim 24 wherein the plant is selected from the group consisting of eucalyptus, pine, acacia, poplar, sweetgum, teak and mahogany species.

27. An isolated polypeptide comprising a DNA-binding domain, wherein the DNA-binding domain comprises an amino acid sequence selected from the group consisting of SEQ ID NO: 2279-2293 and 2296-2368.
